(19) United States
(12) Patent Application Publication
(10) Pub. No.: US 2021/0324398 A1
(43) Pub. Date: Oct. 21, 2021

(54) EDITED NAC GENES IN PLANTS

(71) Applicant: PIONEER HI-BRED INTERNATIONAL, INC., JOHNSTON, IA (US)

(72) Inventors: ZHENGLIN HOU, ANKENY, IA (US); MARY A RUPE, ALTOONA, IA (US); BO SHEN, JOHNSTON, IA (US); ROBERT W WILLIAMS, MINNEAPOLIS, MN (US); WEIQING ZENG, JOHNSTON, IA (US); JUN ZHANG, JOHNSTON, IA (US)

(73) Assignee: PIONEER HI-BRED INTERNATIONAL, INC., JOHNSTON, IA (US)

(21) Appl. No.: 16/972,739

(22) PCT Filed: Jun. 19, 2019
(86) PCT No.: PCT/US19/37991

§ 371 Date: Dec. 7, 2020

Related U.S. Application Data
(60) Provisional application No. 62/692,182, filed on Jun. 29, 2018.

(51) Int. Cl. C12N 15/82

(52) U.S. Cl. CPC C12N 15/8266; C12N 15/8213

(57) ABSTRACT

Compositions and methods for editing an endogenous NAC genes in plants are provided, for the improvement of traits of agronomic or commercial importance. Modifications of expression and activity of NAC genes are described, including editing endogenous NAC gene functional motifs and knocking out NAC gene function.

### CROSS-REFERENCE TO RELATED APPLICATION

[0001] This application is a 371 National Stage Entry of PCT Application No. PCT/US19/37991 filed 19 Jun. 2019, which claims the benefit of U.S. Provisional Patent Application Ser. No. 62/692,182 filed 29 Jun. 2018, all of which are herein incorporated by reference in their entireties.

### REFERENCE TO SEQUENCE LISTING SUBMITTED ELECTRONICALLY

[0002] The official copy of the sequence listing is submitted electronically via EFS-Web as an ASCII formatted sequence listing with a file named 7765USPCT_SeqListing_ST25.TXT created on 2 Nov. 2020 and having a size of 1,086,390 bytes and is filed concurrently with the specification. The sequence listing comprised in this ASCII formatted document is part of the specification and is herein incorporated by reference in its entirety.

### FIELD OF THE INVENTION

[0003] This disclosure relates to compositions and methods of improving traits of agronomic importance in plants.

### BACKGROUND

[0004] Yield is a trait of particular economic interest, especially because of increasing world population and the dwindling supply of arable land available for agriculture. Crops such as corn, wheat, rice, canola and soybean account for over half the total human caloric intake, whether through direct consumption of the seeds themselves or through consumption of meat products raised on processed seeds.

[0005] Several factors contribute to crop yield. One approach to increase crop yield is to extend the duration of active photosynthesis. The stay-green phenotype has been associated with increases in crop yield. Plants assimilate carbohydrates and nitrogen in vegetative organs (source) and remobilize them to newly developing tissues during development, or to reproductive organs (sink) during senescence. Increasing source strength in cereal crops can lead to increase in grain yield. Staygreen trait (or delayed senescence) during the final stage of leaf development is considered an important trait in increasing source strength in grain production. Staygreen is broadly categorized into two groups, functional and nonfunctional. Functional staygreen is defined as retaining both greenness and photosynthetic competence much longer during senescence.

[0006] Recent advances in plant genetic engineering have opened new doors to engineer plants to have improved characteristics or traits. Knockdowns or knockouts of some genes have been demonstrated to provide improved traits of agronomic interest to plants, particularly crop plants. In plants, the NAC genes are a class of transcription factors involved in a variety of functions including embryonic, floral, and vegetative development, lateral root formation and auxin signaling, as well as viral defense and resistance to a variety of biotic and abiotic stresses. Stay-green is valuable trait for improving crop stress tolerance and yield. Delaying leaf senescence may lead to a stay-green phenotype, increased photosynthetic period, and improved source capacity. Novel methods and compositions for delaying leaf senescence in plants are desirable.

### SUMMARY OF INVENTION

[0007] In one aspect, the invention provides a method of modifying an endogenous genomic locus of a plant, the locus comprising a polynucleotide encoding a NAC polypeptide, said method comprising introducing one or more genetic modifications comprising polynucleotide insertions, deletions, substitutions, or a combination thereof, such that the genetic modifications result in a reduced expression of the polynucleotide encoding the NAC polypeptide or reduced activity of the NAC polypeptide compared to a control plant not comprising the one or more introduced genetic modifications.

[0008] In one aspect, the invention provides a method of modifying an endogenous genomic locus of a plant, the locus comprising a polynucleotide encoding a NAC polypeptide, said method comprising introducing one or more genetic modifications comprising polynucleotide insertions, deletions, substitutions, or a combination thereof, such that the genetic modifications result in a reduced expression of the polynucleotide encoding the NAC polypeptide or reduced activity of the NAC polypeptide compared to a control plant not comprising the one or more introduced genetic modifications, wherein the modification produces an improved trait of agronomic importance.

[0009] In any aspect, the modification of an endogenous genomic locus of a plant may be effected by providing to at least one cell of the plant a molecular modification agent. The molecular modification agent may be any molecule known in the art to create a double-strand break or alter the chemical composition of at least one nucleotide in a target sequence. Examples of molecular modification agents include, but are not limited to: Cas endonucleases, zinc finger endonucleases, meganucleases, TAL-Effector nucleases, restriction endonucleases cytidine deaminases, adenine deaminases. In some aspects, the Cas endonuclease forms a functional complex with a guide RNA that comprises a sequence capable of hybridization with a target sequence at or near the endogenous genomic locus.

[0010] In one aspect, the invention provides a method of modifying an endogenous genomic locus of a plant, the locus comprising a polynucleotide encoding a NAC polypeptide, said method comprising introducing one or more genetic modifications comprising polynucleotide insertions, deletions, substitutions, or a combination thereof, such that the genetic modifications result in a reduced expression of the polynucleotide encoding the NAC polypeptide or reduced activity of the NAC polypeptide compared to a control plant not comprising the one or more introduced genetic modifications, wherein the modification produces an improved trait of agronomic importance, wherein the trait of agronomic importance is selected from the group consisting of: disease resistance, drought tolerance, heat tolerance, cold tolerance, salinity tolerance, metal tolerance, herbicide tolerance, improved water use efficiency, improved nitrogen utilization, improved nitrogen fixation, stay-green, senescence, pest resistance, herbivore resistance, pathogen resistance, yield improvement, health enhancement, vigor improvement, growth improvement, photosynthetic capability improvement, nutrition enhancement, altered protein content, altered oil content, increased biomass, increased shoot length, increased root length, improved root architecture, modulation of a metabolite, modulation of the proteome, increased seed weight, altered seed carbohydrate composition, altered seed oil composition, altered seed protein composition, altered seed nutrient composition.

[0011] In one aspect, the invention provides a method of modifying an endogenous genomic locus of a plant, the locus comprising a polynucleotide encoding a NAC polypeptide, said method comprising introducing one or more genetic modifications comprising polynucleotide insertions, deletions, substitutions, or a combination thereof, such that the genetic modifications result in a reduced expression of the polynucleotide encoding the NAC polypeptide or reduced activity of the NAC polypeptide compared to a control plant not comprising the one or more introduced genetic modifications, wherein the genetic modification(s) is(are) introduced by an RNA-guided CRISPR endonuclease, a site-specific deaminase, a meganuclease, a zinc-finger nuclease, or a combination thereof.

[0012] In one aspect, the invention provides a method of modifying an endogenous genomic locus of a plant, the locus comprising a polynucleotide encoding a NAC polypeptide, said method comprising introducing one or more genetic modifications comprising polynucleotide insertions, deletions, substitutions, or a combination thereof, such that the genetic modifications result in a reduced expression of the polynucleotide encoding the NAC polypeptide or reduced activity of the NAC polypeptide compared to a control plant not comprising the one or more introduced genetic modifications, wherein insertion or deletion of at least one nucleotide in or near the NAC coding region effects a frameshift in the endogenous NAC gene.

[0013] In one aspect, the invention provides a method of modifying an endogenous genomic locus of a plant, the locus comprising a polynucleotide encoding a NAC polypeptide, said method comprising introducing one or more genetic modifications comprising polynucleotide insertions, deletions, substitutions, or a combination thereof, such that the genetic modifications result in a reduced expression of the polynucleotide encoding the NAC polypeptide or reduced activity of the NAC polypeptide compared to a control plant not comprising the one or more introduced genetic modifications, wherein a regulatory expression element of the endogenous NAC gene is altered.

[0014] In one aspect, the invention provides a method of modifying an endogenous genomic locus of a plant, the locus comprising a polynucleotide encoding a NAC polypeptide, said method comprising introducing one or more genetic modifications comprising polynucleotide insertions, deletions, substitutions, or a combination thereof, such that the genetic modifications result in a reduced expression of the polynucleotide encoding the NAC polypeptide or reduced activity of the NAC polypeptide compared to a control plant not comprising the one or more introduced genetic modifications, wherein at least 1 base, at least 2 bases, at least 3 bases, at least 4 bases, at least 5 bases, or more than 5 bases of the endogenous NAC gene is(are) deleted.

[0015] In one aspect, the invention provides a method of modifying an endogenous genomic locus of a plant, the locus comprising a polynucleotide encoding a NAC polypeptide, said method comprising introducing one or more genetic modifications comprising polynucleotide insertions, deletions, substitutions, or a combination thereof, such that the genetic modifications result in a reduced expression of the polynucleotide encoding the NAC polypeptide or reduced activity of the NAC polypeptide compared to a control plant not comprising the one or more introduced genetic modifications, wherein at least 1 base, at least 2 bases, at least 3 bases, at least 4 bases, at least 5 bases, or more than 5 bases of the endogenous NAC gene is(are) inserted.

[0016] In one aspect, the invention provides a method of modifying an endogenous genomic locus of a plant, the locus comprising a polynucleotide encoding a NAC polypeptide, said method comprising introducing one or more genetic modifications comprising polynucleotide insertions, deletions, substitutions, or a combination thereof, such that the genetic modifications result in a reduced expression of the polynucleotide encoding the NAC polypeptide or reduced activity of the NAC polypeptide compared to a control plant not comprising the one or more introduced genetic modifications, wherein a functional motif of the endogenous NAC gene is replaced or altered.

[0017] In one aspect, the invention provides a method of modifying an endogenous genomic locus of a plant, the locus comprising a polynucleotide encoding a NAC polypeptide, said method comprising introducing one or more genetic modifications comprising polynucleotide insertions, deletions, substitutions, or a combination thereof, such that the genetic modifications result in a reduced expression of the polynucleotide encoding the NAC polypeptide or reduced activity of the NAC polypeptide compared to a control plant not comprising the one or more introduced genetic modifications, wherein a functional motif of the endogenous NAC gene is replaced or altered, wherein the functional motif is selected from the group consisting of: (a) a DNA interaction domain comprising at least two beta sheets and a sequence comprising a tryptophan, an acidic residue, and a basic residue; (b) a protein recognition domain comprising an alpha helix with a plurality of proline residues; (c) a C-terminal domain comprising a tryptophan; (d) an amino acid sequence sharing at least 5 identical amino acids with the sequence YWKATGKDR, wherein one must be tryptophan, one must be an acidic residue, and one must be a basic residue; (e) an amino acid sequence sharing at least 5 identical amino acids with the sequence PATPPPPPLPP, wherein at least 2, at least 3, at least 4, or at least 5 must be proline; and (e) an amino acid sequence sharing at least 5 identical amino acids with the sequence AAGAVVASSAWMNHF, wherein one must be an aromatic residue, in some aspects tryptophan.

[0018] In one aspect, the invention provides a method of modifying an endogenous genomic locus of a plant, the locus comprising a polynucleotide encoding a NAC polypeptide, said method comprising introducing one or more genetic modifications comprising polynucleotide insertions, deletions, substitutions, or a combination thereof, such that the genetic modifications result in a reduced expression of the polynucleotide encoding the NAC polypeptide or reduced activity of the NAC polypeptide compared to a control plant not comprising the one or more introduced genetic modifications, wherein a plurality of sites of the endogenous NAC gene are altered.

[0019] In one aspect, the invention provides a method of modifying an endogenous genomic locus of a plant, the locus comprising a polynucleotide encoding a NAC polypeptide, said method comprising introducing one or more genetic modifications comprising polynucleotide insertions, deletions, substitutions, or a combination thereof, such that the genetic modifications result in a reduced expression of the polynucleotide encoding the NAC polypeptide or reduced activity of the NAC polypeptide compared to a control plant not comprising the one or more introduced genetic modifications, wherein a plurality of sites of the endogenous NAC gene are altered, wherein at least one of the sites is upstream of the coding region.

[0020] In one aspect, the invention provides a method of modifying an endogenous genomic locus of a plant, the locus comprising a polynucleotide encoding a NAC polypeptide, said method comprising introducing one or more genetic modifications comprising polynucleotide insertions, deletions, substitutions, or a combination thereof, such that the genetic modifications result in a reduced expression of the polynucleotide encoding the NAC polypeptide or reduced activity of the NAC polypeptide compared to a control plant not comprising the one or more introduced genetic modifications, wherein said modifying comprises introducing a double-strand-break-inducing agent to the polynucleotide of the allele.

[0021] In one aspect, the invention provides a method of modifying an endogenous genomic locus of a plant, the locus comprising a polynucleotide encoding a NAC polypeptide, said method comprising introducing one or more genetic modifications comprising polynucleotide insertions, deletions, substitutions, or a combination thereof, such that the genetic modifications result in a reduced expression of the polynucleotide encoding the NAC polypeptide or reduced activity of the NAC polypeptide compared to a control plant not comprising the one or more introduced genetic modifications, wherein said modifying comprises introducing a double-strand-break-inducing agent to the polynucleotide of the allele, wherein the double-strand-break-inducing agent is a Cas endonuclease.

[0022] In one aspect, the invention provides a method of modifying an endogenous genomic locus of a plant, the locus comprising a polynucleotide encoding a NAC polypeptide, said method comprising introducing one or more genetic modifications comprising polynucleotide insertions, deletions, substitutions, or a combination thereof, such that the genetic modifications result in a reduced expression of the polynucleotide encoding the NAC polypeptide or reduced activity of the NAC polypeptide compared to a control plant not comprising the one or more introduced genetic modifications, wherein said modifying comprises introducing a double-strand-break-inducing agent to the polynucleotide of the allele, wherein the double-strand-break-inducing agent is a Cas endonuclease lacking nuclease capability, operably linked to a heterologous nuclease.

[0023] In one aspect, the invention provides a method of modifying an endogenous genomic locus of a plant, the locus comprising a polynucleotide encoding a NAC polypeptide, said method comprising introducing one or more genetic modifications comprising polynucleotide insertions, deletions, substitutions, or a combination thereof, such that the genetic modifications result in a reduced expression of the polynucleotide encoding the NAC polypeptide or reduced activity of the NAC polypeptide compared to a control plant not comprising the one or more introduced genetic modifications, wherein said modifying comprises introducing a double-strand-break-inducing agent to the polynucleotide of the allele, wherein the double-strand-break-inducing agent is a Cas endonuclease lacking nuclease capability, operably linked to a site-specific nuclease.

[0024] In one aspect, the invention provides a method of modifying an endogenous genomic locus of a plant, the locus comprising a polynucleotide encoding a NAC polypeptide, said method comprising introducing one or more genetic modifications comprising polynucleotide insertions, deletions, substitutions, or a combination thereof, such that the genetic modifications result in a reduced expression of the polynucleotide encoding the NAC polypeptide or reduced activity of the NAC polypeptide compared to a control plant not comprising the one or more introduced genetic modifications, wherein said modifying comprises introducing a double-strand-break-inducing agent to the polynucleotide of the allele, wherein the double-strand-break-inducing agent is a Cas endonuclease further comprising a guide polynucleotide, wherein the guide polynucleotide is substantially complementary to a polynucleotide on, or within 100 nucleotides of, the endogenous NAC gene.

[0025] In one aspect, the invention provides a method of modifying an endogenous genomic locus of a plant, the locus comprising a polynucleotide encoding a NAC polypeptide, said method comprising introducing one or more genetic modifications comprising polynucleotide insertions, deletions, substitutions, or a combination thereof, such that the genetic modifications result in a reduced expression of the polynucleotide encoding the NAC polypeptide or reduced activity of the NAC polypeptide compared to a control plant not comprising the one or more introduced genetic modifications, wherein said modifying comprises introducing a double-strand-break-inducing agent to the polynucleotide of the allele, wherein the double-strand-break-inducing agent is Cas9 or Cpf1.

[0026] In one aspect, the invention provides a method of modifying an endogenous genomic locus of a plant, the locus comprising a polynucleotide encoding a NAC polypeptide, said method comprising introducing one or more genetic modifications comprising polynucleotide insertions, deletions, substitutions, or a combination thereof, such that the genetic modifications result in a reduced expression of the polynucleotide encoding the NAC polypeptide or reduced activity of the NAC polypeptide compared to a control plant not comprising the one or more introduced genetic modifications, wherein said modifying comprises introducing a double-strand-break-inducing agent to the polynucleotide of the allele, wherein the double-strand-break-inducing agent is a Cas endonuclease further comprising a guide polynucleotide, wherein the guide polynucleotide is substantially complementary to a polynucleotide on, or within 100 nucleotides of, the endogenous NAC gene, wherein two sites are altered with two different guide polynucleotides.

[0027] In one aspect, the invention provides a method of modifying an endogenous genomic locus of a plant, the locus comprising a polynucleotide encoding a NAC polypeptide, said method comprising introducing one or more genetic modifications comprising polynucleotide insertions, deletions, substitutions, or a combination thereof, such that the genetic modifications result in a reduced expression of the polynucleotide encoding the NAC polypeptide or reduced activity of the NAC polypeptide compared to a control plant not comprising the one or more introduced genetic modifications, wherein the plant is a monocot.

[0028] In one aspect, the invention provides a method of modifying an endogenous genomic locus of a plant, the locus comprising a polynucleotide encoding a NAC polypeptide, said method comprising introducing one or more genetic modifications comprising polynucleotide insertions, deletions, substitutions, or a combination thereof, such that the genetic modifications result in a reduced expression of the polynucleotide encoding the NAC polypeptide or reduced activity of the NAC polypeptide compared to a control plant not comprising the one or more introduced genetic modifications, wherein the plant is maize.

[0029] In one aspect, the invention provides a method of modifying an endogenous genomic locus of a plant, the locus comprising a polynucleotide encoding a NAC polypeptide, said method comprising introducing one or more genetic modifications comprising polynucleotide insertions, deletions, substitutions, or a combination thereof, such that the genetic modifications result in a reduced expression of the polynucleotide encoding the NAC polypeptide or reduced activity of the NAC polypeptide compared to a control plant not comprising the one or more introduced genetic modifications, wherein the NAC polypeptide is NAC7.

[0030] In one aspect, the invention provides a method of modifying an endogenous genomic locus of a plant, the locus comprising a polynucleotide encoding a NAC polypeptide, said method comprising introducing one or more genetic modifications comprising polynucleotide insertions, deletions, substitutions, or a combination thereof, such that the genetic modifications result in a reduced expression of the polynucleotide encoding the NAC polypeptide or reduced activity of the NAC polypeptide compared to a control plant not comprising the one or more introduced genetic modifications, wherein the NAC polypeptide is NAC7, further comprising introducing a first edit at a position between −291 and −292 bases upstream of the start codon ATG, and introducing a second edit at a position between 122 and 123 bases downstream of the start codon ATG.

[0031] In one aspect, the invention provides a method of modifying an endogenous genomic locus of a plant, the locus comprising a polynucleotide encoding a NAC polypeptide, said method comprising introducing one or more genetic modifications comprising polynucleotide insertions, deletions, substitutions, or a combination thereof, such that the genetic modifications result in a reduced expression of the polynucleotide encoding the NAC polypeptide or reduced activity of the NAC polypeptide compared to a control plant not comprising the one or more introduced genetic modifications, wherein the NAC polypeptide is NAC7, wherein the average grain moisture of the kernels from a cob of a plant produced by the method is not more than 1.0%, 1.1%, 1.2%, 1.3%, 1.4%, 1.5%, 1.6%, 1.7%, 1.8%, 1.9%, 2.0%, 3%, 4%, or 5% higher than that of a null control.

[0032] In one aspect, the invention provides a method of modifying an endogenous genomic locus of a plant, the locus comprising a polynucleotide encoding a NAC polypeptide, said method comprising introducing one or more genetic modifications comprising polynucleotide insertions, deletions, substitutions, or a combination thereof, such that the genetic modifications result in a reduced expression of the polynucleotide encoding the NAC polypeptide or reduced activity of the NAC polypeptide compared to a control plant not comprising the one or more introduced genetic modifications, wherein the NAC polypeptide is NAC7, wherein the NAC7 polypeptide comprises a sequence that shares at least at least 50%, between 50% and 55%, at least 55%, between 55% and 60%, at least 60%, between 60% and 65%, at least 65%, between 65% and 70%, at least 70%, between 70% and 75%, at least 75%, between 75% and 80%, at least 80%, between 80% and 85%, at least 85%, between 85% and 90%, at least 90%, between 90% and 95%, at least 95%, between 95% and 96%, at least 96%, between 96% and 97%, at least 97%, between 97% and 98%, at least 98%, between 98% and 99%, at least 99%, between 99% and 100%, or 100% sequence identity with at least 50, between 50 and 100, at least 100, between 100 and 125, at least 125, between 125 and 150, at least 150, between 150 and 200, at least 200, between 200 and 250, at least 250, between 250 and 300, at least 300, between 300 and 325, and at least 325 contiguous amino acids of any of SEQID NOs: 3, 38-226, or 266-403.

[0033] In one aspect, the invention provides a method of improving a trait of agronomic importance in a plant, the method comprising introducing, at an endogenous genomic locus of the plant comprising a polynucleotide encoding a NAC polypeptide, one or more genetic modifications polynucleotide insertions, deletions, substitutions or a combination thereof, such that the genetic modifications result in a reduced expression of the polynucleotide encoding the NAC polypeptide or reduced activity of the NAC polypeptide, as compared to a control plant not comprising the edit, wherein the modification produces an improved trait of agronomic importance.

[0034] In one aspect, the invention provides a method of improving a trait of agronomic importance in a plant, the method comprising introducing, at an endogenous genomic locus of the plant comprising a polynucleotide encoding a NAC polypeptide, one or more genetic modifications polynucleotide insertions, deletions, substitutions or a combination thereof, such that the genetic modifications result in a reduced expression of the polynucleotide encoding the NAC polypeptide or reduced activity of the NAC polypeptide, as compared to a control plant not comprising the edit, wherein the modification produces an improved trait of agronomic importance, wherein the trait of agronomic importance is selected from the group consisting of: disease resistance, drought tolerance, heat tolerance, cold tolerance, salinity tolerance, metal tolerance, herbicide tolerance, improved water use efficiency, improved nitrogen utilization, improved nitrogen fixation, stay-green, senescence, pest resistance, herbivore resistance, pathogen resistance, yield improvement, health enhancement, vigor improvement, growth improvement, photosynthetic capability improvement, nutrition enhancement, altered protein content, altered oil content, increased biomass, increased shoot length, increased root length, improved root architecture, modulation of a metabolite, modulation of the proteome, increased seed weight, altered seed carbohydrate composition, altered seed oil composition, altered seed protein composition, and altered seed nutrient composition.

[0035] In one aspect, the invention provides a method of improving a trait of agronomic importance in a plant, the method comprising introducing, at an endogenous genomic locus of the plant comprising a polynucleotide encoding a NAC polypeptide, one or more genetic modifications polynucleotide insertions, deletions, substitutions or a combination thereof, such that the genetic modifications result in a reduced expression of the polynucleotide encoding the NAC polypeptide or reduced activity of the NAC polypeptide, as compared to a control plant not comprising the edit, wherein the genetic modification(s) is(are) introduced by an RNA-guided CRISPR endonuclease, a site-specific deaminase, a meganuclease, a zinc-finger nuclease, or a combination thereof.

[0036] In one aspect, the invention provides a method of improving a trait of agronomic importance in a plant, the method comprising introducing, at an endogenous genomic locus of the plant comprising a polynucleotide encoding a NAC polypeptide, one or more genetic modifications polynucleotide insertions, deletions, substitutions or a combination thereof, such that the genetic modifications result in a reduced expression of the polynucleotide encoding the NAC polypeptide or reduced activity of the NAC polypeptide, as compared to a control plant not comprising the edit, wherein insertion or deletion of at least one nucleotide in or near the NAC coding region effects a frameshift in the endogenous NAC gene.

[0037] In one aspect, the invention provides a method of improving a trait of agronomic importance in a plant, the method comprising introducing, at an endogenous genomic locus of the plant comprising a polynucleotide encoding a NAC polypeptide, one or more genetic modifications polynucleotide insertions, deletions, substitutions or a combination thereof, such that the genetic modifications result in a reduced expression of the polynucleotide encoding the NAC polypeptide or reduced activity of the NAC polypeptide, as compared to a control plant not comprising the edit, wherein a regulatory expression element of the endogenous NAC gene is altered.

[0038] In one aspect, the invention provides a method of improving a trait of agronomic importance in a plant, the method comprising introducing, at an endogenous genomic locus of the plant comprising a polynucleotide encoding a NAC polypeptide, one or more genetic modifications polynucleotide insertions, deletions, substitutions or a combination thereof, such that the genetic modifications result in a reduced expression of the polynucleotide encoding the NAC polypeptide or reduced activity of the NAC polypeptide, as compared to a control plant not comprising the edit, wherein at least 1 base, at least 2 bases, at least 3 bases, at least 4 bases, at least 5 bases, or more than 5 bases of the endogenous NAC gene is(are) deleted.

[0039] In one aspect, the invention provides a method of improving a trait of agronomic importance in a plant, the method comprising introducing, at an endogenous genomic locus of the plant comprising a polynucleotide encoding a NAC polypeptide, one or more genetic modifications polynucleotide insertions, deletions, substitutions or a combination thereof, such that the genetic modifications result in a reduced expression of the polynucleotide encoding the NAC polypeptide or reduced activity of the NAC polypeptide, as compared to a control plant not comprising the edit, wherein at least 1 base, at least 2 bases, at least 3 bases, at least 4 bases, at least 5 bases, or more than 5 bases of the endogenous NAC gene is(are) inserted.

[0040] In one aspect, the invention provides a method of improving a trait of agronomic importance in a plant, the method comprising introducing, at an endogenous genomic locus of the plant comprising a polynucleotide encoding a NAC polypeptide, one or more genetic modifications polynucleotide insertions, deletions, substitutions or a combination thereof, such that the genetic modifications result in a reduced expression of the polynucleotide encoding the NAC polypeptide or reduced activity of the NAC polypeptide, as compared to a control plant not comprising the edit, wherein a functional motif of the endogenous NAC gene is replaced or altered.

[0041] In one aspect, the invention provides a method of improving a trait of agronomic importance in a plant, the method comprising introducing, at an endogenous genomic locus of the plant comprising a polynucleotide encoding a NAC polypeptide, one or more genetic modifications polynucleotide insertions, deletions, substitutions or a combination thereof, such that the genetic modifications result in a reduced expression of the polynucleotide encoding the NAC polypeptide or reduced activity of the NAC polypeptide, as compared to a control plant not comprising the edit, wherein the functional motif is selected from the group consisting of: (a) a DNA interaction domain comprising at least two beta sheets and a sequence comprising a tryptophan, an acidic residue, and a basic residue; (b) a protein recognition domain comprising an alpha helix with a plurality of proline residues; (c) a C-terminal domain comprising a tryptophan; (d) an amino acid sequence sharing at least 5 identical amino acids with the sequence YWKATGKDR, wherein one must be tryptophan, one must be an acidic residue, and one must be a basic residue; (e) an amino acid sequence sharing at least 5 identical amino acids with the sequence PATPPPPPLPP, wherein at least 2, at least 3, at least 4, or at least 5 must be proline; and (e) an amino acid sequence sharing at least 5 identical amino acids with the sequence AAGAVVASSAWMNHF, wherein one must be an aromatic residue, in some aspects tryptophan.

[0042] In one aspect, the invention provides a method of improving a trait of agronomic importance in a plant, the method comprising introducing, at an endogenous genomic locus of the plant comprising a polynucleotide encoding a NAC polypeptide, one or more genetic modifications polynucleotide insertions, deletions, substitutions or a combination thereof, such that the genetic modifications result in a reduced expression of the polynucleotide encoding the NAC polypeptide or reduced activity of the NAC polypeptide, as compared to a control plant not comprising the edit, wherein a plurality of sites of the endogenous NAC gene are altered.

[0043] In one aspect, the invention provides a method of improving a trait of agronomic importance in a plant, the method comprising introducing, at an endogenous genomic locus of the plant comprising a polynucleotide encoding a NAC polypeptide, one or more genetic modifications polynucleotide insertions, deletions, substitutions or a combination thereof, such that the genetic modifications result in a reduced expression of the polynucleotide encoding the NAC polypeptide or reduced activity of the NAC polypeptide, as compared to a control plant not comprising the edit, wherein a plurality of sites of the endogenous NAC gene are altered, wherein at least one of the sites is upstream of the coding region.

[0044] In one aspect, the invention provides a method of improving a trait of agronomic importance in a plant, the method comprising introducing, at an endogenous genomic locus of the plant comprising a polynucleotide encoding a NAC polypeptide, one or more genetic modifications polynucleotide insertions, deletions, substitutions or a combination thereof, such that the genetic modifications result in a reduced expression of the polynucleotide encoding the NAC polypeptide or reduced activity of the NAC polypeptide, as compared to a control plant not comprising the edit, wherein said modifying comprises introducing a double-strand-break-inducing agent to the polynucleotide of the allele.

[0045] In one aspect, the invention provides a method of improving a trait of agronomic importance in a plant, the method comprising introducing, at an endogenous genomic locus of the plant comprising a polynucleotide encoding a NAC polypeptide, one or more genetic modifications polynucleotide insertions, deletions, substitutions or a combination thereof, such that the genetic modifications result in a reduced expression of the polynucleotide encoding the NAC polypeptide or reduced activity of the NAC polypeptide, as compared to a control plant not comprising the edit, wherein said modifying comprises introducing a double-strand-break-inducing agent to the polynucleotide of the allele, wherein the double-strand-break-inducing agent is a Cas endonuclease.

[0046] In one aspect, the invention provides a method of improving a trait of agronomic importance in a plant, the method comprising introducing, at an endogenous genomic locus of the plant comprising a polynucleotide encoding a NAC polypeptide, one or more genetic modifications polynucleotide insertions, deletions, substitutions or a combination thereof, such that the genetic modifications result in a reduced expression of the polynucleotide encoding the NAC polypeptide or reduced activity of the NAC polypeptide, as compared to a control plant not comprising the edit, wherein said modifying comprises introducing a double-strand-break-inducing agent to the polynucleotide of the allele, wherein the double-strand-break-inducing agent is a Cas endonuclease lacking nuclease capability, operably linked to a heterologous nuclease.

[0047] In one aspect, the invention provides a method of improving a trait of agronomic importance in a plant, the method comprising introducing, at an endogenous genomic locus of the plant comprising a polynucleotide encoding a NAC polypeptide, one or more genetic modifications polynucleotide insertions, deletions, substitutions or a combination thereof, such that the genetic modifications result in a reduced expression of the polynucleotide encoding the NAC polypeptide or reduced activity of the NAC polypeptide, as compared to a control plant not comprising the edit, wherein said modifying comprises introducing a double-strand-break-inducing agent to the polynucleotide of the allele, wherein the double-strand-break-inducing agent is a Cas endonuclease lacking nuclease capability, operably linked to a site-specific nuclease.

[0048] In one aspect, the invention provides a method of improving a trait of agronomic importance in a plant, the method comprising introducing, at an endogenous genomic locus of the plant comprising a polynucleotide encoding a NAC polypeptide, one or more genetic modifications polynucleotide insertions, deletions, substitutions or a combination thereof, such that the genetic modifications result in a reduced expression of the polynucleotide encoding the NAC polypeptide or reduced activity of the NAC polypeptide, as compared to a control plant not comprising the edit, wherein said modifying comprises introducing a double-strand-break-inducing agent to the polynucleotide of the allele, wherein the double-strand-break-inducing agent is a Cas endonuclease further comprising a guide polynucleotide, wherein the guide polynucleotide is substantially complementary to a polynucleotide on, or within 100 nucleotides of, the endogenous NAC gene.

[0049] In one aspect, the invention provides a method of improving a trait of agronomic importance in a plant, the method comprising introducing, at an endogenous genomic locus of the plant comprising a polynucleotide encoding a NAC polypeptide, one or more genetic modifications polynucleotide insertions, deletions, substitutions or a combination thereof, such that the genetic modifications result in a reduced expression of the polynucleotide encoding the NAC polypeptide or reduced activity of the NAC polypeptide, as compared to a control plant not comprising the edit, wherein said modifying comprises introducing a double-strand-break-inducing agent to the polynucleotide of the allele, wherein the double-strand-break-inducing agent is Cas9 or Cpf1.

[0050] In one aspect, the invention provides a method of improving a trait of agronomic importance in a plant, the method comprising introducing, at an endogenous genomic locus of the plant comprising a polynucleotide encoding a NAC polypeptide, one or more genetic modifications polynucleotide insertions, deletions, substitutions or a combination thereof, such that the genetic modifications result in a reduced expression of the polynucleotide encoding the NAC polypeptide or reduced activity of the NAC polypeptide, as compared to a control plant not comprising the edit, wherein said modifying comprises introducing a double-strand-break-inducing agent to the polynucleotide of the allele, wherein the double-strand-break-inducing agent is a Cas endonuclease further comprising a guide polynucleotide, wherein the guide polynucleotide is substantially complementary to a polynucleotide on, or within 100 nucleotides of, the endogenous NAC gene, wherein two sites are altered with two different guide polynucleotides.

[0051] In one aspect, the invention provides a method of improving a trait of agronomic importance in a plant, the method comprising introducing, at an endogenous genomic locus of the plant comprising a polynucleotide encoding a NAC polypeptide, one or more genetic modifications polynucleotide insertions, deletions, substitutions or a combination thereof, such that the genetic modifications result in a reduced expression of the polynucleotide encoding the NAC polypeptide or reduced activity of the NAC polypeptide, as compared to a control plant not comprising the edit, wherein the plant is a monocot.

[0052] In one aspect, the invention provides a method of improving a trait of agronomic importance in a plant, the method comprising introducing, at an endogenous genomic locus of the plant comprising a polynucleotide encoding a NAC polypeptide, one or more genetic modifications polynucleotide insertions, deletions, substitutions or a combination thereof, such that the genetic modifications result in a reduced expression of the polynucleotide encoding the NAC polypeptide or reduced activity of the NAC polypeptide, as compared to a control plant not comprising the edit, wherein the plant is maize.

[0053] In one aspect, the invention provides a method of improving a trait of agronomic importance in a plant, the method comprising introducing, at an endogenous genomic locus of the plant comprising a polynucleotide encoding a NAC polypeptide, one or more genetic modifications polynucleotide insertions, deletions, substitutions or a combination thereof, such that the genetic modifications result in a reduced expression of the polynucleotide encoding the NAC polypeptide or reduced activity of the NAC polypeptide, as compared to a control plant not comprising the edit, wherein the NAC polypeptide is NAC7.

[0054] In one aspect, the invention provides a method of improving a trait of agronomic importance in a plant, the method comprising introducing, at an endogenous genomic locus of the plant comprising a polynucleotide encoding a NAC polypeptide, one or more genetic modifications polynucleotide insertions, deletions, substitutions or a combination thereof, such that the genetic modifications result in a reduced expression of the polynucleotide encoding the NAC polypeptide or reduced activity of the NAC polypeptide, as compared to a control plant not comprising the edit, wherein the NAC polypeptide is NAC7, wherein the NAC7 polypeptide comprises a sequence that shares at least at least 50%, between 50% and 55%, at least 55%, between 55% and 60%, at least 60%, between 60% and 65%, at least 65%, between 65% and 70%, at least 70%, between 70% and 75%, at least 75%, between 75% and 80%, at least 80%, between 80% and 85%, at least 85%, between 85% and 90%, at least 90%, between 90% and 95%, at least 95%, between 95% and 96%, at least 96%, between 96% and 97%, at least 97%, between 97% and 98%, at least 98%, between 98% and 99%, at least 99%, between 99% and 100%, or 100% sequence identity with at least 50, between 50 and 100, at least 100, between 100 and 125, at least 125, between 125 and 150, at least 150, between 150 and 200, at least 200, between 200 and 250, at least 250, between 250 and 300, at least 300, between 300 and 325, and at least 325 contiguous amino acids of any of SEQID NOs: 3, 38-226, or 266-403.

[0055] In one aspect, the invention provides a method of improving a trait of agronomic importance in a plant, the method comprising introducing, at an endogenous genomic locus of the plant comprising a polynucleotide encoding a NAC polypeptide, one or more genetic modifications polynucleotide insertions, deletions, substitutions or a combination thereof, such that the genetic modifications result in a reduced expression of the polynucleotide encoding the NAC polypeptide or reduced activity of the NAC polypeptide, as compared to a control plant not comprising the edit, wherein the NAC polypeptide is NAC7, further comprising introducing a first edit at a position between −291 and −292 bases upstream of the start codon ATG, and introducing a second edit at a position between 122 and 123 bases downstream of the start codon ATG.

[0056] In one aspect, the invention provides a method of improving a trait of agronomic importance in a plant, the method comprising introducing, at an endogenous genomic locus of the plant comprising a polynucleotide encoding a NAC polypeptide, one or more genetic modifications polynucleotide insertions, deletions, substitutions or a combination thereof, such that the genetic modifications result in a reduced expression of the polynucleotide encoding the NAC polypeptide or reduced activity of the NAC polypeptide, as compared to a control plant not comprising the edit, wherein the average grain moisture of the kernels from a cob of a plant produced by the method is not more than 2%, 3%, 4%, or 5% higher than that of a null control.

[0057] In one aspect, the invention provides a method of altering the binding specificity of a NAC protein in a plant, the method comprising introducing an edit to a sequence motif comprising: N1-N2-N3-N4-N5-N6-N7-N8-N9, wherein: N1=F, R, T, V, or Y; N2=W; N3=H, K, R, N, or S; N4=S, P, T, I A, or K; N5=T, S, A, V, or E; N6=G, A, or C; N7=R, K, A, S, T, P, or N; N8=D, S, T, E, or P; or N9=K, E, C, G, T, or R.

[0058] In one aspect, the invention provides a method of altering the binding specificity of a NAC protein in a plant, the method comprising introducing an edit to at least two, at least three, at least four, at least five, at least six, at least seven, at least eight, or nine positions of a contiguous sequence motif N1-N2-N3-N4-N5-N6-N7-N8-N9, wherein the naturally occurring amino acids at each position comprise: N1=F, R, T, V, or Y; N2=W; N3=H, K, R, N, or S; N4=S, P, T, I A, or K; N5=T, S, A, V, or E; N6=G, A, or C; N7=R, K, A, S, T, P, or N; N8=D, S, T, E, or P; and N9=K, E, C, G, T, or R.

[0059] In one aspect, the invention provides a method of altering the binding specificity of a NAC protein in a plant, the method comprising introducing an edit to at least two, at least three, at least four, at least five, at least six, at least seven, at least eight, or nine positions of a contiguous sequence motif N1-N2-N3-N4-N5-N6-N7-N8-N9, wherein the naturally occurring amino acids at each position consist of: N1=F, R, T, V, or Y; N2=W; N3=H, K, R, N, or S; N4=S, P, T, I A, or K; N5=T, S, A, V, or E; N6=G, A, or C; N7=R, K, A, S, T, P, or N; N8=D, S, T, E, or P; and N9=K, E, C, G, T, or R.

[0060] In one aspect, the invention provides a method of altering the binding specificity of a NAC protein in a plant, the method comprising introducing an edit to a sequence motif comprising: N1-N2-N3-N4-N5-N6-N7-N8-N9, wherein: N1=F, R, T, V, or Y; N2=W; N3=H, K, R, N, or S; N4=S, P, T, I A, or K; N5=T, S, A, V, or E; N6=G, A, or C; N7=R, K, A, S, T, P, or N; N8=D, S, T, E, or P; or N9=K, E, C, G, T, or R; wherein the plant is a monocot.

[0061] In one aspect, the invention provides a method of altering the binding specificity of a NAC protein in a plant, the method comprising introducing an edit to a sequence motif comprising: N1-N2-N3-N4-N5-N6-N7-N8-N9, wherein: N1=F, R, T, V, or Y; N2=W; N3=H, K, R, N, or S; N4=S, P, T, I A, or K; N5=T, S, A, V, or E; N6=G, A, or C; N7=R, K, A, S, T, P, or N; N8=D, S, T, E, or P; or N9=K, E, C, G, T, or R; wherein the plant is maize.

[0062] In one aspect, the invention provides a method of altering the binding specificity of a NAC protein in a plant, the method comprising introducing an edit to a sequence motif comprising: N1-N2-N3-N4-N5-N6-N7-N8-N9, wherein: N1=F, R, T, V, or Y; N2=W; N3=H, K, R, N, or S; N4=S, P, T, I A, or K; N5=T, S, A, V, or E; N6=G, A, or C; N7=R, K, A, S, T, P, or N; N8=D, S, T, E, or P; or N9=K, E, C, G, T, or R; wherein the NAC polypeptide is NAC7.

[0063] In one aspect, the invention provides a method of altering the binding specificity of a NAC protein in a plant, the method comprising introducing at least two edits to a sequence motif comprising: N1-N2-N3-N4-N5-N6-N7-N8-N9, wherein: N1=F, R, T, V, or Y; N2=W; N3=H, K, R, N, or S; N4=S, P, T, I A, or K; N5=T, S, A, V, or E; N6=G, A, or C; N7=R, K, A, S, T, P, or N; N8=D, S, T, E, or P; or N9=K, E, C, G, T, or R; wherein a first edit is created at a position between −291 and −292 bases upstream of the start codon ATG, and a second edit is created at a position between 122 and 123 bases downstream of the start codon ATG.

[0064] In one aspect, the invention provides a method of altering the binding specificity of a NAC protein in a plant, the method comprising introducing at least two edits to a sequence motif comprising: N1-N2-N3-N4-N5-N6-N7-N8-N9, wherein: N1=F, R, T, V, or Y; N2=W; N3=H, K, R, N, or S; N4=S, P, T, I A, or K; N5=T, S, A, V, or E; N6=G, A, or C; N7=R, K, A, S, T, P, or N; N8=D, S, T, E, or P; or N9=K, E, C, G, T, or R; wherein the NAC protein is NAC7.

[0065] In one aspect, the invention provides a method of altering the binding specificity of a NAC protein in a plant, the method comprising introducing at least one edit to a sequence motif comprising: N1-N2-N3-N4-N5-N6-N7-N8-N9, wherein: N1=F, R, T, V, or Y; N2=W; N3=H, K, R, N, or S; N4=S, P, T, I A, or K; N5=T, S, A, V, or E; N6=G, A, or C; N7=R, K, A, S, T, P, or N; N8=D, S, T, E, or P; or N9=K, E, C, G, T, or R; wherein the NAC7 polypeptide comprises a sequence that shares at least at least 50%, between 50% and 55%, at least 55%, between 55% and 60%, at least 60%, between 60% and 65%, at least 65%, between 65% and 70%, at least 70%, between 70% and 75%, at least 75%, between 75% and 80%, at least 80%, between 80% and 85%, at least 85%, between 85% and 90%, at least 90%, between 90% and 95%, at least 95%, between 95% and 96%, at least 96%, between 96% and 97%, at least 97%, between 97% and 98%, at least 98%, between 98% and 99%, at least 99%, between 99% and 100%, or 100% sequence identity with at least 50, between 50 and 100, at least 100, between 100 and 125, at least 125, between 125 and 150, at least 150, between 150 and 200, at least 200, between 200 and 250, at least 250, between 250 and 300, at least 300, between 300 and 325, and at least 325 contiguous amino acids of any of SEQID NOs: 3, 38-226, or 266-403.

[0066] In one aspect, the invention provides a method of altering the binding specificity of a NAC protein in a plant, the method comprising introducing at least one edit to a sequence motif comprising: N1-N2-N3-N4-N5-N6-N7-N8-N9, wherein: N1=F, R, T, V, or Y; N2=W; N3=H, K, R, N, or S; N4=S, P, T, I A, or K; N5=T, S, A, V, or E; N6=G, A, or C; N7=R, K, A, S, T, P, or N; N8=D, S, T, E, or P; or N9=K, E, C, G, T, or R; wherein the average grain moisture of the kernels from a cob of a plant produced by the method is not more than 1.0%, 1.1%, 1.2%, 1.3%, 1.4%, 1.5%, 1.6%, 1.7%, 1.8%, 1.9%, or 2.0% higher than that of a null control.

[0067] In one aspect, the invention provides a plant comprising at least one modification in at least one allele of a NAC gene, wherein the modification produces an improved trait of agronomic importance in the plant.

[0068] In one aspect, the invention provides a plant comprising at least one modification in at least one allele of a NAC gene, wherein the modification produces an improved trait of agronomic importance in the plant, wherein the NAC gene encodes a NAC7 polypeptide.

[0069] In one aspect, the invention provides a plant comprising at least one modification in at least one allele of a NAC gene, wherein the modification produces an improved trait of agronomic importance in the plant, wherein the NAC gene encodes a NAC7 polypeptide, wherein the NAC7 polypeptide comprises a sequence that shares at least at least 50%, between 50% and 55%, at least 55%, between 55% and 60%, at least 60%, between 60% and 65%, at least 65%, between 65% and 70%, at least 70%, between 70% and 75%, at least 75%, between 75% and 80%, at least 80%, between 80% and 85%, at least 85%, between 85% and 90%, at least 90%, between 90% and 95%, at least 95%, between 95% and 96%, at least 96%, between 96% and 97%, at least 97%, between 97% and 98%, at least 98%, between 98% and 99%, at least 99%, between 99% and 100%, or 100% sequence identity with at least 50, between 50 and 100, at least 100, between 100 and 125, at least 125, between 125 and 150, at least 150, between 150 and 200, at least 200, between 200 and 250, at least 250, between 250 and 300, at least 300, between 300 and 325, and at least 325 contiguous amino acids of any of SEQID NOs: 3, 38-226, or 266-403.

[0070] In any aspect, a plant is provided with an edited NAC gene, wherein the plant is a monocot or a dicot.

[0071] In any aspect, a plant is provided with an edited NAC gene, wherein the plant is a monocot selected from the group consisting of: corn (Zea mays), rice (Oryza sativa), rye (Secale cereale), sorghum (Sorghum bicolor, Sorghum vulgare), millet (e.g., pearl millet (Pennisetum glaucum), proso millet (Panicum miliaceum), foxtail millet (Setaria italica), finger millet (Eleusine coracana)), wheat (Triticum species, for example Triticum aestivum, Triticum monococcum), sugarcane (Saccharum spp.), oats (Avena), barley (Hordeum), switchgrass (Panicum virgatum), pineapple (Ananas comosus), banana (Musa spp.), palm, ornamentals, turfgrasses, and other grasses.

[0072] In any aspect, a plant is provided with an edited NAC gene, wherein the plant is a dicot selected from the group consisting of: soybean (Glycine max), Brassica species (for example but not limited to: oilseed rape or Canola) (Brassica napus, B. campestris, Brassica rapa, Brassica juncea), alfalfa (Medicago sativa), tobacco (Nicotiana tabacum), Arabidopsis (Arabidopsis thaliana), sunflower (Helianthus annuus), cotton (Gossypium arboreum, Gossypium barbadense), and peanut (Arachis hypogaea), tomato (Solanum lycopersicum), potato (Solanum tuberosum).

[0073] In any aspect, a plant is provided with an edited NAC gene, wherein the edit imparts an improved trait of agronomic importance to the plant, wherein the trait of agronomic importance is selected from the group consisting of: disease resistance, drought tolerance, heat tolerance, cold tolerance, salinity tolerance, metal tolerance, herbicide tolerance, improved water use efficiency, improved nitrogen utilization, improved nitrogen fixation, stay-green, senescence, pest resistance, herbivore resistance, pathogen resistance, yield improvement, health enhancement, vigor improvement, growth improvement, photosynthetic capability improvement, nutrition enhancement, altered protein content, altered oil content, increased biomass, increased shoot length, increased root length, improved root architecture, modulation of a metabolite, modulation of the proteome, increased seed weight, altered seed carbohydrate composition, altered seed oil composition, altered seed protein composition, and altered seed nutrient composition.

[0074] In any aspect, a progeny of a parental plant with an edited NAC gene is provided, wherein the progeny retains the improved trait of agronomic importance imparted to the parental plant, wherein the trait of agronomic importance is selected from the group consisting of: disease resistance, drought tolerance, heat tolerance, cold tolerance, salinity tolerance, metal tolerance, herbicide tolerance, improved water use efficiency, improved nitrogen utilization, improved nitrogen fixation, stay-green, senescence, pest resistance, herbivore resistance, pathogen resistance, yield improvement, health enhancement, vigor improvement, growth improvement, photosynthetic capability improvement, nutrition enhancement, altered protein content, altered oil content, increased biomass, increased shoot length, increased root length, improved root architecture, modulation of a metabolite, modulation of the proteome, increased seed weight, altered seed carbohydrate composition, altered seed oil composition, altered seed protein composition, and altered seed nutrient composition.

[0075] In one aspect, a plant produced by any of the methods described herein is provided.

### BRIEF DESCRIPTION OF THE DRAWINGS AND THE SEQUENCE LISTING

[0076] The disclosure can be more fully understood from the following detailed description and the accompanying drawings and Sequence Listing, which form a part of this application. The sequence descriptions and sequence listing attached hereto comply with the rules governing nucleotide and amino acid sequence disclosures in patent applications as set forth in 37 C.F.R. §§ 1.821 and 1.825. The sequence descriptions comprise the three letter codes for amino acids as defined in 37 C.F.R. §§ 1.821 and 1.825, which are incorporated herein by reference.

[0077] FIG. 1 depicts three strategies to generate a non-functional NAC7 allele in maize by genome editing.

[0078] FIG. 2 describes the guide RNAs and the targeted editing sites in the NAC7 gene.

[0079] FIG. 3 describes sequence changes observed in Event 1 of PHP80319 (CR1: −13 bp; CR2: +1 bp).

[0080] FIG. 4 describes sequence changes observed in Event 2 of PHP80319 (CR1: −76 bp; CR2: +1 bp).

[0081] FIG. 5 describes sequence changes observed in Event 3 of PHP80319 (CR1: −55 bp; CR2: −5 bp).

[0082] FIG. 6 shows knock out of NAC7 delayed dark induced senescence in leaf.

[0083] FIG. 7 demonstrates knockdown of NAC7 by the RNAi construct increased percent kernel moisture.

[0084] FIG. 8A shows the Zea mays NAC7 N-terminal domain structure predicted from the Arabidopsis analog. The major structure core consists of a 6 stranded beta sheet (β2-β3-β7-β6-β5-β4). FIG. 8B shows alpha helices α2 and α3 flanking the sheet's β2-β3 on both sides while the β5-β4 curled significantly forming semi-barrel with help of β3′. FIG. 8C shows that NAC7 functions as a homodimer, related with a 2-fold axis with its interface formed by the N-terminal peptide including α1-loop-β1.

[0085] FIG. 9 shows that the central β-sheet's β4 edge (with the motif YWKATGKDR (SEQID NO:229)) inserts into the DNA duplex major groove, determining the sequence recognition specificity, and shows the major interaction between the NAC7 and its targeting DNA duplex. The specific-determining DNA binding motif residues are labeled along the β4.

[0086] FIG. 10 shows the Zea mays NAC7 variant sequence (SEQID NO:3) central β-sheet's β4 edge motif is depicted with a dashed line box, with other elements shown, including loops spanning β3-β3′ loop, β5-β6, and β7-C-ter interact with the DNA phosphate backbone.

[0087] FIG. 11 shows conserved regions of the Zea mays NAC7 variant (SEQID NO:3), with the predicted helix areas shown as solid line boxed areas, and the central β-sheet's β4 edge motif depicted with a dashed line box.

[0088] FIG. 12A shows a stereo view of aromatic residues interacting with PolyP in a profilin molecule, showing the polyproline (PolyP) segment (PATPPPPPLPP (SEQID NO:230)) that is associated with protein recognition, providing an excellent docking site for aromatic residues. FIG. 12B depicts a three-dimensional model of the PolyP segment.

[0089] FIG. 13 shows a phylogenetic tree for the maize NAC proteins, with Glade clustering from the sequences of the central β-sheet's (34 edge region identified.

[0090] FIG. 14 shows a multiple sequence alignment of selected Zea mays NAC genes, with the β-sheet's (34 edge region variations outlined in black boxes, with the conserved DNA binding motif highlighted. The secondary structural elements are also labeled such that a is for helix and (3 for beta strand.

[0091] SEQID NO:1 is the Genomic DNA of NAC7 in Variety A DNA of Zea mays.

[0092] SEQID NO:2 is the CDS of NAC7 in Variety A DNA of Zea mays.

[0093] SEQID NO:3 is the Amino acids sequence of NAC7 in Variety A protein of Zea mays.

[0094] SEQID NO:4 is the Sequence of Line 1 amplified by GSPs (GSP1+GSP2) DNA of Zea mays.

[0095] SEQID NO:5 is the Sequence of Line 1 amplified by GSPs (GSP3+GSP4) DNA of Zea mays.

[0096] SEQID NO:6 is the Sequence of Line 2 amplified by GSPs (GSP1+GSP2) DNA of Zea mays.

[0097] SEQID NO:7 is the Sequence of Line 2 amplified by GSPs (GSP3+GSP4) DNA of Zea mays.

[0098] SEQID NO:8 is the Sequence of Line 3 amplified by GSPs (GSP1+GSP2) DNA of Zea mays.

[0099] SEQID NO:9 is the Sequence of Line 3 amplified by GSPs (GSP3+GSP4) DNA of Zea mays.

[0100] SEQID NO:10 is the oligo nucleotide forward primer amplifying target NAC7 DNA of Artificial.

[0101] SEQID NO:11 is the oligo nucleotide reverse primer amplifying target NAC7 DNA of Artificial.

[0102] SEQID NO:12 is the oligo nucleotide forward primer amplifying target NAC7 DNA of Artificial.

[0103] SEQID NO:13 is the oligo nucleotide forward primer amplifying target NAC7 DNA of Artificial.

[0104] SEQID NO:14 is the Guide RNA targeting CR1 site of NAC7 DNA of Artificial.

[0105] SEQID NO:15 is the Guide RNA targeting CR2 site of NAC7 DNA of Artificial.

[0106] SEQID NO:16 is the Guide RNA for NAC7 gene deletion as described in Example 8 DNA of Artificial.

[0107] SEQID NO:17 is the Guide RNA for NAC7 gene deletion as described in Example 8 DNA of Artificial.

[0108] SEQID NO:18 is the Guide RNA for NAC7 gene deletion as described in Example 8 DNA of Artificial.

[0109] SEQID NO:19 is the Guide RNA for NAC7 gene deletion as described in Example 8 DNA of Artificial.

[0110] SEQID NO:20 is the Guide RNA for DNA binding motif null as described in Example 8 DNA of Artificial.

[0111] SEQID NO:21 is the Guide RNA for DNA binding motif null as described in Example 8 DNA of Artificial.

[0112] SEQID NO:22 is the Guide RNA for NAC7 promoter editing as described in Example 8 DNA of Artificial.

[0113] SEQID NO:23 is the Guide RNA for NAC7 promoter editing as described in Example 8 DNA of Artificial.

[0114] SEQID NO:24 is the Guide RNA for NAC7 promoter editing as described in Example 8 DNA of Artificial.

[0115] SEQID NO:25 is the Guide RNA for NAC7 promoter editing as described in Example 8 DNA of Artificial.

[0116] SEQID NO:26 is the Guide RNA for NAC7 promoter editing as described in Example 8 DNA of Artificial.

[0117] SEQID NO:27 is the Guide RNA for NAC7 promoter editing as described in Example 8 DNA of Artificial.

[0118] SEQID NO:28 is the Guide RNA for NAC7 promoter editing as described in Example 8 DNA of Artificial.

[0119] SEQID NO:29 is the Guide RNA for NAC7 promoter editing as described in Example 8 DNA of Artificial.

[0120] SEQID NO:30 is the Cas9 protein protein of Streptococcus pyogenes.

[0121] SEQID NO:31 is the AmCYAN1 DNA of Anemonia majano.

[0122] SEQID NO:32 is the NPTII DNA of Escherichia coli.

[0123] SEQID NO:33 is the ZmODP2 DNA of Zea mays.

[0124] SEQID NO:34 is the Kan resistance marker DNA of Escherichia coli.

[0125] SEQID NO:35 is the ZM-U6 POLIII CHR8 promoter DNA of Zea mays.

[0126] SEQID NO:36 is the ZmWUS2 DNA of Zea mays.

[0127] SEQID NO:37 is the cas9 gene DNA of Streptococcus pyogenes.

[0128] SEQID NO:38 is the Zea mays NAC gene AC196475.3_FGP005 protein.

[0129] SEQID NO:39 is the Zea mays NAC gene AC198937.4_FGP005 protein.

[0130] SEQID NO:40 is the Zea mays NAC gene AC203535.4_FGP002 protein.

[0131] SEQID NO:41 is the Zea mays NAC gene AC205484.3_FGP005 protein.

[0132] SEQID NO:42 is the Zea mays NAC gene AC208663.3_FGP002 protein.

[0133] SEQID NO:43 is the Zea mays NAC gene AC211478.3_FGP004 protein.

[0134] SEQID NO:44 is the Zea mays NAC gene AC212859.3_FGP008 protein.

[0135] SEQID NO:45 is the Zea mays NAC gene AC233865.1_FGP003 protein.

[0136] SEQID NO:46 is the Zea mays NAC gene GRMZM2G003715_P01 protein.

[0137] SEQID NO:47 is the Zea mays NAC gene GRMZM2G004531_P01 protein.

[0138] SEQID NO:48 is the Zea mays NAC gene GRMZM2G008374_P01 protein.

[0139] SEQID NO:49 is the Zea mays NAC gene GRMZM2G008374_P02 protein.

[0140] SEQID NO:50 is the Zea mays NAC gene GRMZM2G009892_P01 protein.

[0141] SEQID NO:51 is the Zea mays NAC gene GRMZM2G009892_P02 protein.

[0142] SEQID NO:52 is the Zea mays NAC gene GRMZM2G009892_P03 protein.

[0143] SEQID NO:53 is the Zea mays NAC gene GRMZM2G009892_P04 protein.

[0144] SEQID NO:54 is the Zea mays NAC gene GRMZM2G011598_P01 protein.

[0145] SEQID NO:55 is the Zea mays NAC gene GRMZM2G014653_P01 protein.

[0146] SEQID NO:56 is the Zea mays NAC gene GRMZM2G014653_P02 protein.

[0147] SEQID NO:57 is the Zea mays NAC gene GRMZM2G014653_P03 protein.

[0148] SEQID NO:58 is the Zea mays NAC gene GRMZM2G014653_P04 protein.

[0149] SEQID NO:59 is the Zea mays NAC gene GRMZM2G018436_P01 protein.

[0150] SEQID NO:60 is the Zea mays NAC gene GRMZM2G018553_P01 protein.

[0151] SEQID NO:61 is the Zea mays NAC gene GRMZM2G018553_P02 protein.

[0152] SEQID NO:62 is the Zea mays NAC gene GRMZM2G025642_P01 protein.

[0153] SEQID NO:63 is the Zea mays NAC gene GRMZM2G025642_P02 protein.

[0154] SEQID NO:64 is the Zea mays NAC gene GRMZM2G027309_P01 protein.

[0155] SEQID NO:65 is the Zea mays NAC gene GRMZM2G027309_P02 protein.

[0156] SEQID NO:66 is the Zea mays NAC gene GRMZM2G030325_P01 protein.

[0157] SEQID NO:67 is the Zea mays NAC gene GRMZM2G031001_P01 protein.

[0158] SEQID NO:68 is the Zea mays NAC gene GRMZM2G031200_P01 protein.

[0159] SEQID NO:69 is the Zea mays NAC gene GRMZM2G031200_P02 protein.

[0160] SEQID NO:70 is the Zea mays NAC gene GRMZM2G033014_P01 protein.

[0161] SEQID NO:71 is the Zea mays NAC gene GRMZM2G038073_P01 protein.

[0162] SEQID NO:72 is the Zea mays NAC gene GRMZM2G041668_P01 protein.

[0163] SEQID NO:73 is the Zea mays NAC gene GRMZM2G041746_P01 protein.

[0164] SEQID NO:74 is the Zea mays NAC gene GRMZM2G041746_P02 protein.

[0165] SEQID NO:75 is the Zea mays NAC gene GRMZM2G042494_P01 protein.

[0166] SEQID NO:76 is the Zea mays NAC gene GRMZM2G043813_P01 protein.

[0167] SEQID NO:77 is the Zea mays NAC gene GRMZM2G048826_P01 protein.

[0168] SEQID NO:78 is the Zea mays NAC gene GRMZM2G052239_P01 protein.

[0169] SEQID NO:79 is the Zea mays NAC gene GRMZM2G054252_P01 protein.

[0170] SEQID NO:80 is the Zea mays NAC gene GRMZM2G054252_P02 protein.

[0171] SEQID NO:81 is the Zea mays NAC gene GRMZM2G054277_P01 protein.

[0172] SEQID NO:82 is the Zea mays NAC gene GRMZM2G054277_P02 protein.

[0173] SEQID NO:83 is the Zea mays NAC gene GRMZM2G058518_P01 protein.

[0174] SEQID NO:84 is the Zea mays NAC gene GRMZM2G059428_P01 protein.

[0175] SEQID NO:85 is the Zea mays NAC gene GRMZM2G059428_P02 protein.

[0176] SEQID NO:86 is the Zea mays NAC gene GRMZM2G059428_P03 protein.

[0177] SEQID NO:87 is the Zea mays NAC gene GRMZM2G060116_P01 protein.

[0178] SEQID NO:88 is the Zea mays NAC gene GRMZM2G062009_P01 protein.

[0179] SEQID NO:89 is the Zea mays NAC gene GRMZM2G062009_P02 protein.

[0180] SEQID NO:90 is the Zea mays NAC gene GRMZM2G062650_P01 protein.

[0181] SEQID NO:91 is the Zea mays NAC gene GRMZM2G062650_P02 protein.

[0182] SEQID NO:92 is the Zea mays NAC gene GRMZM2G063522_P01 protein.

[0183] SEQID NO:93 is the Zea mays NAC gene GRMZM2G064541_P01 protein.

[0184] SEQID NO:94 is the Zea mays NAC gene GRMZM2G068973_P01 protein.

[0185] SEQID NO:95 is the Zea mays NAC gene GRMZM2G069047_P01 protein.

[0186] SEQID NO:96 is the Zea mays NAC gene GRMZM2G069047_P02 protein.

[0187] SEQID NO:97 is the Zea mays NAC gene GRMZM2G074358_P01 protein.

[0188] SEQID NO:98 is the Zea mays NAC gene GRMZM2G077045_P02 protein.

[0189] SEQID NO:99 is the Zea mays NAC gene GRMZM2G078954_P01 protein.

[0190] SEQID NO:100 is the Zea mays NAC gene GRMZM2G079632_P01 protein.

[0191] SEQID NO:101 is the Zea mays NAC gene GRMZM2G079632_P02 protein.

[0192] SEQID NO:102 is the Zea mays NAC gene GRMZM2G081930_P01 protein.

[0193] SEQID NO:103 is the Zea mays NAC gene GRMZM2G082709_P01 protein.

[0194] SEQID NO:104 is the Zea mays NAC gene GRMZM2G083347_P01 protein.

[0195] SEQID NO:105 is the Zea mays NAC gene GRMZM2G083347_P02 protein.

[0196] SEQID NO:106 is the Zea mays NAC gene GRMZM2G086768_P01 protein.

[0197] SEQID NO:107 is the Zea mays NAC gene GRMZM2G091490_P01 protein.

[0198] SEQID NO:108 is the Zea mays NAC gene GRMZM2G092465_P01 protein.

[0199] SEQID NO:109 is the Zea mays NAC gene GRMZM2G092465_P03 protein.

[0200] SEQID NO:110 is the Zea mays NAC gene GRMZM2G094067_P01 protein.

[0201] SEQID NO:111 is the Zea mays NAC gene GRMZM2G099144_P01 protein.

[0202] SEQID NO:112 is the Zea mays NAC gene GRMZM2G100583_P01 protein.

[0203] SEQID NO:113 is the Zea mays NAC gene GRMZM2G100583_P02 protein.

[0204] SEQID NO:114 is the Zea mays NAC gene GRMZM2G100593_P01 protein.

[0205] SEQID NO:115 is the Zea mays NAC gene GRMZM2G104074_P01 protein.

[0206] SEQID NO:116 is the Zea mays NAC gene GRMZM2G104078_P02 protein.

[0207] SEQID NO:117 is the Zea mays NAC gene GRMZM2G104078_P03 protein.

[0208] SEQID NO:118 is the Zea mays NAC gene GRMZM2G104400_P01 protein.

[0209] SEQID NO:119 is the Zea mays NAC gene GRMZM2G104400_P02 protein.

[0210] SEQID NO:120 is the Zea mays NAC gene GRMZM2G109627_P01 protein.

[0211] SEQID NO:121 is the Zea mays NAC gene GRMZM2G111770_P01 protein.

[0212] SEQID NO:122 is the Zea mays NAC gene GRMZM2G112548_P01 protein.

[0213] SEQID NO:123 is the Zea mays NAC gene GRMZM2G112681_P01 protein.

[0214] SEQID NO:124 is the Zea mays NAC gene GRMZM2G112681_P02 protein.

[0215] SEQID NO:125 is the Zea mays NAC gene GRMZM2G113950_P01 protein.

[0216] SEQID NO:126 is the Zea mays NAC gene GRMZM2G114850_P01 protein.

[0217] SEQID NO:127 is the Zea mays NAC gene GRMZM2G115721_P01 protein.

[0218] SEQID NO:128 is the Zea mays NAC gene GRMZM2G122615_P01 protein.

[0219] SEQID NO:129 is the Zea mays NAC gene GRMZM2G123246_P01 protein.

[0220] SEQID NO:130 is the Zea mays NAC gene GRMZM2G123667_P02 protein.

[0221] SEQID NO:131 is the Zea mays NAC gene GRMZM2G123667_P04 protein.

[0222] SEQID NO:132 is the Zea mays NAC gene GRMZM2G123667_P05 protein.

[0223] SEQID NO:133 is the Zea mays NAC gene GRMZM2G125777_P01 protein.

[0224] SEQID NO:134 is the Zea mays NAC gene GRMZM2G126817_P01 protein.

[0225] SEQID NO:135 is the Zea mays NAC gene GRMZM2G126936_P01 protein.

[0226] SEQID NO:136 is the Zea mays NAC gene GRMZM2G127379_P01 protein.

[0227] SEQID NO:137 is the Zea mays NAC gene GRMZM2G134073_P01 protein.

[0228] SEQID NO:138 is the Zea mays NAC gene GRMZM2G134073_P02 protein.

[0229] SEQID NO:139 is the Zea mays NAC gene GRMZM2G134687_P01 protein.

[0230] SEQID NO:140 is the Zea mays NAC gene GRMZM2G134717_P01 protein.

[0231] SEQID NO:141 is the Zea mays NAC gene GRMZM2G139700_P01 protein.

[0232] SEQID NO:142 is the Zea mays NAC gene GRMZM2G140901_P01 protein.

[0233] SEQID NO:143 is the Zea mays NAC gene GRMZM2G140901_P02 protein.

[0234] SEQID NO:144 is the Zea mays NAC gene GRMZM2G146380_P01 protein.

[0235] SEQID NO:145 is the Zea mays NAC gene GRMZM2G147867_P01 protein.

[0236] SEQID NO:146 is the Zea mays NAC gene GRMZM2G152543_P01 protein.

[0237] SEQID NO:147 is the Zea mays NAC gene GRMZM2G154182_P01 protein.

[0238] SEQID NO:148 is the Zea mays NAC gene GRMZM2G154182_P02 protein.

[0239] SEQID NO:149 is the Zea mays NAC gene GRMZM2G154182_P03 protein.

[0240] SEQID NO:150 is the Zea mays NAC gene GRMZM2G155816_P01 protein.

[0241] SEQID NO:151 is the Zea mays NAC gene GRMZM2G156977_P01 protein.

[0242] SEQID NO:152 is the Zea mays NAC gene GRMZM2G158204_P01 protein.

[0243] SEQID NO:153 is the Zea mays NAC gene GRMZM2G159094_P01 protein.

[0244] SEQID NO:154 is the Zea mays NAC gene GRMZM2G159500_P01 protein.

[0245] SEQID NO:155 is the Zea mays NAC gene GRMZM2G159500_P02 protein.

[0246] SEQID NO:156 is the Zea mays NAC gene GRMZM2G162739_P01 protein.

[0247] SEQID NO:157 is the Zea mays NAC gene GRMZM2G162739_P02 protein.

[0248] SEQID NO:158 is the Zea mays NAC gene GRMZM2G163251_P01 protein.

[0249] SEQID NO:159 is the Zea mays NAC gene GRMZM2G163841_P01 protein.

[0250] SEQID NO:160 is the Zea mays NAC gene GRMZM2G163843_P01 protein.

[0251] SEQID NO:161 is the Zea mays NAC gene GRMZM2G163914_P02 protein.

[0252] SEQID NO:162 is the Zea mays NAC gene GRMZM2G163914_P03 protein.

[0253] SEQID NO:163 is the Zea mays NAC gene GRMZM2G166721_P01 protein.

[0254] SEQID NO:164 is the Zea mays NAC gene GRMZM2G166721_P02 protein.

[0255] SEQID NO:165 is the Zea mays NAC gene GRMZM2G166721_P03 protein.

[0256] SEQID NO:166 is the Zea mays NAC gene GRMZM2G167018_P01 protein.

[0257] SEQID NO:167 is the Zea mays NAC gene GRMZM2G167492_P01 protein.

[0258] SEQID NO:168 is the Zea mays NAC gene GRMZM2G171395_P01 protein.

[0259] SEQID NO:169 is the Zea mays NAC gene GRMZM2G172264_P01 protein.

[0260] SEQID NO:170 is the Zea mays NAC gene GRMZM2G174070_P01 protein.

[0261] SEQID NO:171 is the Zea mays NAC gene GRMZM2G176677_P01 protein.

[0262] SEQID NO:172 is the Zea mays NAC gene GRMZM2G176677_P02 protein.

[0263] SEQID NO:173 is the Zea mays NAC gene GRMZM2G176677_P04 protein.

[0264] SEQID NO:174 is the Zea mays NAC gene GRMZM2G178998_P01 protein.

[0265] SEQID NO:175 is the Zea mays NAC gene GRMZM2G178998_P02 protein.

[0266] SEQID NO:176 is the Zea mays NAC gene GRMZM2G179049_P01 protein.

[0267] SEQID NO:177 is the Zea mays NAC gene GRMZM2G179049_P02 protein.

[0268] SEQID NO:178 is the Zea mays NAC gene GRMZM2G179885_P01 protein.

[0269] SEQID NO:179 is the Zea mays NAC gene GRMZM2G179885_P02 protein.

[0270] SEQID NO:180 is the Zea mays NAC gene GRMZM2G179885_P03 protein.

[0271] SEQID NO:181 is the Zea mays NAC gene GRMZM2G179885_P04 protein.

[0272] SEQID NO:182 is the Zea mays NAC gene GRMZM2G180328_P01 protein.

[0273] SEQID NO:183 is the Zea mays NAC gene GRMZM2G181605_P01 protein.

[0274] SEQID NO:184 is the Zea mays NAC gene GRMZM2G312201_P01 protein.

[0275] SEQID NO:185 is the Zea mays NAC gene GRMZM2G312201_P02 protein.

[0276] SEQID NO:186 is the Zea mays NAC gene GRMZM2G312201_P03 protein.

[0277] SEQID NO:187 is the Zea mays NAC gene GRMZM2G312201_P04 protein.

[0278] SEQID NO:188 is the Zea mays NAC gene GRMZM2G315140_P01 protein.

[0279] SEQID NO:189 is the Zea mays NAC gene GRMZM2G316840_P01 protein.

[0280] SEQID NO:190 is the Zea mays NAC gene GRMZM2G336533_P01 protein.

[0281] SEQID NO:191 is the Zea mays NAC gene GRMZM2G336533_P02 protein.

[0282] SEQID NO:192 is the Zea mays NAC gene GRMZM2G342647_P01 protein.

[0283] SEQID NO:193 is the Zea mays NAC gene GRMZM2G347043_P01 protein.

[0284] SEQID NO:194 is the Zea mays NAC gene GRMZM2G354151_P01 protein.

[0285] SEQID NO:195 is the Zea mays NAC gene GRMZM2G379608_P01 protein.

[0286] SEQID NO:196 is the Zea mays NAC gene GRMZM2G386163_P01 protein.

[0287] SEQID NO:197 is the Zea mays NAC gene GRMZM2G386163_P02 protein.

[0288] SEQID NO:198 is the Zea mays NAC gene GRMZM2G389557_P01 protein.

[0289] SEQID NO:199 is the Zea mays NAC gene GRMZM2G393433_P01 protein.

[0290] SEQID NO:200 is the Zea mays NAC gene GRMZM2G393433_P02 protein.

[0291] SEQID NO:201 is the Zea mays NAC gene GRMZM2G406204_P01 protein.

[0292] SEQID NO:202 is the Zea mays NAC gene GRMZM2G430522_P01 protein.

[0293] SEQID NO:203 is the Zea mays NAC gene GRMZM2G430522_P02 protein.

[0294] SEQID NO:204 is the Zea mays NAC gene GRMZM2G430522_P03 protein.

[0295] SEQID NO:205 is the Zea mays NAC gene GRMZM2G430849_P01 protein.

[0296] SEQID NO:206 is the Zea mays NAC gene GRMZM2G435824_P01 protein.

[0297] SEQID NO:207 is the Zea mays NAC gene GRMZM2G439903_P01 protein.

[0298] SEQID NO:208 is the Zea mays NAC gene GRMZM2G440219_P01 protein.

[0299] SEQID NO:209 is the Zea mays NAC gene GRMZM2G450445_P01 protein.

[0300] SEQID NO:210 is the Zea mays NAC gene GRMZM2G450445_P02 protein.

[0301] SEQID NO:211 is the Zea mays NAC gene GRMZM2G456568_P01 protein.

[0302] SEQID NO:212 is the Zea mays NAC gene GRMZM2G456568_P02 protein.

[0303] SEQID NO:213 is the Zea mays NAC gene GRMZM2G459156_P01 protein.

[0304] SEQID NO:214 is the Zea mays NAC gene GRMZM2G465835_P01 protein.

[0305] SEQID NO:215 is the Zea mays NAC gene GRMZM2G475014_P01 protein.

[0306] SEQID NO:216 is the Zea mays NAC gene GRMZM2G479980_P01 protein.

[0307] SEQID NO:217 is the Zea mays NAC gene GRMZM5G803888_P01 protein.

[0308] SEQID NO:218 is the Zea mays NAC gene GRMZM5G813651_P01 protein.

[0309] SEQID NO:219 is the Zea mays NAC gene GRMZM5G813651_P02 protein.

[0310] SEQID NO:220 is the Zea mays NAC gene GRMZM5G832473_P01 protein.

[0311] SEQID NO:221 is the Zea mays NAC gene GRMZM5G857701_P01 protein.

[0312] SEQID NO:222 is the Zea mays NAC gene GRMZM5G885329_P01 protein.

[0313] SEQID NO:223 is the Zea mays NAC gene GRMZM5G894234_P01 protein.

[0314] SEQID NO:224 is the Zea mays NAC gene GRMZM5G898290_P01 protein.

[0315] SEQID NO:225 is the Zea mays NAC gene GRMZM5G898290_P02 protein.

[0316] SEQID NO:226 is the Zea mays NAC gene GRMZM6G257110_P01 protein.

[0317] SEQID NO:227 is the Arabidopsis NAC domain-containing protein 19 3SWM protein of Arabidopsis thaliana.

[0318] SEQID NO:228 is the Rice Stress-induced transcription factor NAC1 protein of Oryza sativa.

[0319] SEQID NO:229 is the central β-sheet's (34 edge motif protein of Zea mays.

[0320] SEQID NO:230 is the polyproline segment associated with protein recognition protein of Zea mays.

[0321] SEQID NO:231 is the C-terminal motif protein of Zea mays.

[0322] SEQID NO:232 is the central β-sheet's (34 edge motif protein of Zea mays.

[0323] SEQID NO:233 is the central β-sheet's (34 edge motif protein of Zea mays.

[0324] SEQID NO:234 is the central β-sheet's (34 edge motif protein of Zea mays.

[0325] SEQID NO:235 is the replacement for DNA binding motif protein of Artificial.

[0326] SEQID NO:236 is the target sequence ZM-NAC7-CR1 DNA of Zea mays.

[0327] SEQID NO:237 is the target sequence ZM-NAC7-CR2 DNA of Zea mays.

[0328] SEQID NO:238 is an exemplary NAC protein motif variation in maize protein of Zea mays.

[0329] SEQID NO:239 is an exemplary NAC protein motif variation in maize protein of Zea mays.

[0330] SEQID NO:240 is an exemplary NAC protein motif variation in maize protein of Zea mays.

[0331] SEQID NO:241 is an exemplary NAC protein motif variation in maize protein of Zea mays.

[0332] SEQID NO:242 is an exemplary NAC protein motif variation in maize protein of Zea mays.

[0333] SEQID NO:243 is an exemplary NAC protein motif variation in maize protein of Zea mays.

[0334] SEQID NO:244 is an exemplary NAC protein motif variation in maize protein of Zea mays.

[0335] SEQID NO:245 is an exemplary NAC protein motif variation in maize protein of Zea mays.

[0336] SEQID NO:246 is an exemplary NAC protein motif variation in maize protein of Zea mays.

[0337] SEQID NO:247 is an exemplary NAC protein motif variation in maize protein of Zea mays.

[0338] SEQID NO:248 is an exemplary NAC protein motif variation in maize protein of Zea mays.

[0339] SEQID NO:249 is an exemplary NAC protein motif variation in maize protein of Zea mays.

[0340] SEQID NO:250 is an exemplary NAC protein motif variation in maize protein of Zea mays.

[0341] SEQID NO:251 is an exemplary NAC protein motif variation in maize protein of Zea mays.

[0342] SEQID NO:252 is an exemplary NAC protein motif variation in maize protein of Zea mays.

[0343] SEQID NO:253 is an exemplary NAC protein motif variation in maize protein of Zea mays.

[0344] SEQID NO:254 is an exemplary NAC protein motif variation in maize protein of Zea mays.

[0345] SEQID NO:255 is an exemplary NAC protein motif variation in maize protein of Zea mays.

[0346] SEQID NO:256 is an exemplary NAC protein motif variation in maize protein of Zea mays.

[0347] SEQID NO:257 is an exemplary NAC protein motif variation in maize protein of Zea mays.

[0348] SEQID NO:258 is an exemplary NAC protein motif variation in maize protein of Zea mays.

[0349] SEQID NO:259 is an exemplary NAC protein motif variation in maize protein of Zea mays.

[0350] SEQID NO:260 is an exemplary NAC protein motif variation in maize protein of Zea mays.

[0351] SEQID NO:261 is an exemplary NAC protein motif variation in maize protein of Zea mays.

[0352] SEQID NO:262 is an exemplary NAC protein motif variation in maize protein of Zea mays.

[0353] SEQID NO:263 is an exemplary NAC protein motif variation in maize protein of Zea mays.

[0354] SEQID NO:264 is an exemplary NAC protein motif variation in maize protein of Zea mays.

[0355] SEQID NO:265 is an exemplary NAC protein motif variation in maize protein of Zea mays.

[0356] SEQID NOs: 266-403 are sequences of NAC proteins.

### DETAILED DESCRIPTION

[0357] Various compositions and methods for decreasing expression of the NAC gene in a cell, for example a plant cell, via gene editing are provided. In some aspects, the NAC gene is NAC7.

[0358] Terms used in the claims and specification are defined as set forth below unless otherwise specified. It must be noted that, as used in the specification and the appended claims, the singular forms “a,” “an” and “the” include plural referents unless the context clearly dictates otherwise.

### Definitions

[0359] The terms “provided (to)” and “introduced (into)” are used interchangeably herein. In another aspect, it is meant that a particular composition becomes functionally associated with a cell or other molecule. In one aspect, it is meant that a particular composition is taken up by the cell into its interior. “Introducing” is intended to mean presenting to a target, such as a cell or organism, a polynucleotide or polypeptide or polynucleotide-protein complex, in such a manner that the component(s) gains access to the interior of a cell of the organism or to the cell itself.

[0360] By the term “endogenous” it is meant a sequence or other molecule that naturally occurs in a cell or organism. In one aspect, an endogenous polynucleotide is normally found in the genome of a cell; that is, not heterologous.

[0361] The term “heterologous” refers to the difference between the original environment, location, or composition of a particular polynucleotide or polypeptide sequence and its current environment, location, or composition. Non-limiting examples include differences in taxonomic derivation (e.g., a polynucleotide sequence obtained from Zea mays would be heterologous if inserted into the genome of an Oryza sativa plant, or of a different variety or cultivar of Zea mays; or a polynucleotide obtained from a bacterium was introduced into a cell of a plant), or sequence (e.g., a polynucleotide sequence obtained from Zea mays, isolated, modified, and re-introduced into a maize plant). As used herein, “heterologous” in reference to a sequence can refer to a sequence that originates from a different species, variety, foreign species, or, if from the same species, is substantially modified from its native form in composition and/or genomic locus by deliberate human intervention. For example, a promoter operably linked to a heterologous polynucleotide is from a species different from the species from which the polynucleotide was derived, or, if from the same/analogous species, one or both are substantially modified from their original form and/or genomic locus, or the promoter is not the native promoter for the operably linked polynucleotide. Alternatively, one or more compositions, such as those provided herein, may be entirely synthetic.

[0362] As used herein, “nucleic acid” means a polynucleotide and includes a single or a double-stranded polymer of deoxyribonucleotide or ribonucleotide bases. Nucleic acids may also include fragments and modified nucleotides. Thus, the terms “polynucleotide”, “nucleic acid sequence”, “nucleotide sequence” and “nucleic acid fragment” are used interchangeably to denote a polymer of RNA and/or DNA and/or RNA-DNA that is single- or double-stranded, optionally comprising synthetic, non-natural, or altered nucleotide bases. Nucleotides (usually found in their 5′-monophosphate form) are referred to by their single letter designation as follows: “A” for adenosine or deoxyadenosine (for RNA or DNA, respectively), “C” for cytosine or deoxycytosine, “G” for guanosine or deoxyguanosine, “U” for uridine, “T” for deoxythymidine, “R” for purines (A or G), “Y” for pyrimidines (C or T), “K” for G or T, “H” for A or C or T, “I” for inosine, and “N” for any nucleotide.

[0363] The relationship between two or more polynucleotides or polypeptides may be determined. Polynucleotide and polypeptide sequences, fragments thereof, variants thereof, and the structural relationships of these sequences can be described by the terms “homology”, “homologous”, “substantially identical”, “substantially similar” and “corresponding substantially” which are used interchangeably herein. These refer to polypeptide or nucleic acid sequences wherein changes in one or more amino acids or nucleotide bases do not affect the function of the molecule, such as the ability to mediate gene expression or to produce a certain phenotype. These terms also refer to modification(s) of nucleic acid sequences that do not substantially alter the functional properties of the resulting nucleic acid relative to the initial, unmodified nucleic acid. These modifications include deletion, substitution, and/or insertion of one or more nucleotides in the nucleic acid fragment.

[0364] Sequence relationships may be defined by their composition comparisons, or by their ability to hybridize, or by their ability to engage in homologous recombination.

[0365] Methods of alignment of sequences for comparison are well known in the art. Thus, the determination of percent sequence identity between any two sequences can be accomplished using a mathematical algorithm. Sequence alignments and percent identity or similarity calculations may be determined using a variety of comparison methods designed to detect homologous sequences including, but not limited to, the MegAlign program of the LASERGENE bioinformatics computing suite (DNASTAR Inc., Madison, Wis.). Within the context of this application it will be understood that where sequence analysis software is used for analysis, that the results of the analysis will be based on the “default values” of the program referenced, unless otherwise specified. As used herein “default values” will mean any set of values or parameters that originally load with the software when first initialized.

[0366] “Sequence identity” or “identity” in the context of nucleic acid or polypeptide sequences refers to the nucleic acid bases or amino acid residues in two sequences that are the same when aligned for maximum correspondence over a specified comparison window. The term “percentage of sequence identity” refers to the value determined by comparing two optimally aligned sequences over a comparison window, wherein the portion of the polynucleotide or polypeptide sequence in the comparison window may comprise additions or deletions (i.e., gaps) as compared to the reference sequence (which does not comprise additions or deletions) for optimal alignment of the two sequences. The percentage is calculated by determining the number of positions at which the identical nucleic acid base or amino acid residue occurs in both sequences to yield the number of matched positions, dividing the number of matched positions by the total number of positions in the window of comparison and multiplying the results by 100 to yield the percentage of sequence identity. Useful examples of percent sequence identities include, but are not limited to, 50%, 55%, 60%, 65%, 70%, 75%, 80%, 85%, 90% or 95%, or any integer percentage from 50% to 100%. These identities can be determined using any of the programs described herein.

[0367] The “Clustal V method of alignment” corresponds to the alignment method labeled Clustal V (described by Higgins and Sharp, (1989) CABIOS 5:151-153; Higgins et al., (1992) Comput Appl Biosci 8:189-191) and found in the MegAlign program of the LASERGENE bioinformatics computing suite (DNASTAR Inc., Madison, Wis.). For multiple alignments, the default values correspond to GAP PENALTY=10 and GAP LENGTH PENALTY=10. Default parameters for pairwise alignments and calculation of percent identity of protein sequences using the Clustal method are KTUPLE=1, GAP PENALTY=3, WINDOW=S and DIAGONALS SAVED=5. For nucleic acids these parameters are KTUPLE=2, GAP PENALTY=5, WINDOW=4 and DIAGONALS SAVED=4. After alignment of the sequences using the Clustal V program, it is possible to obtain a “percent identity” by viewing the “sequence distances” table in the same program. The “Clustal W method of alignment” corresponds to the alignment method labeled Clustal W (described by Higgins and Sharp, (1989) CABIOS 5:151-153; Higgins et al., (1992) Comput Appl Biosci 8:189-191) and found in the MegAlign v6.1 program of the LASERGENE bioinformatics computing suite (DNASTAR Inc., Madison, Wis.). Default parameters for multiple alignment (GAP PENALTY=10, GAP LENGTH PENALTY=0.2, Delay Divergen Seqs (%)=30, DNA Transition Weight=0.5, Protein Weight Matrix=Gonnet Series, DNA Weight Matrix=IUB). After alignment of the sequences using the Clustal W program, it is possible to obtain a “percent identity” by viewing the “sequence distances” table in the same program. Unless otherwise stated, sequence identity/similarity values provided herein refer to the value obtained using GAP Version 10 (GCG, Accelrys, San Diego, Calif.) using the following parameters: % identity and % similarity for a nucleotide sequence using a gap creation penalty weight of 50 and a gap length extension penalty weight of 3, and the nwsgapdna.cmp scoring matrix; % identity and % similarity for an amino acid sequence using a GAP creation penalty weight of 8 and a gap length extension penalty of 2, and the BLOSUM62 scoring matrix (Henikoff and Henikoff, (1989) Proc. Natl. Acad. Sci. USA 89:10915). GAP uses the algorithm of Needleman and Wunsch, (1970) J Mol Biol 48:443-53, to find an alignment of two complete sequences that maximizes the number of matches and minimizes the number of gaps. GAP considers all possible alignments and gap positions and creates the alignment with the largest number of matched bases and the fewest gaps, using a gap creation penalty and a gap extension penalty in units of matched bases. “BLAST” is a searching algorithm provided by the National Center for Biotechnology Information (NCBI) used to find regions of similarity between biological sequences. The program compares nucleotide or protein sequences to sequence databases and calculates the statistical significance of matches to identify sequences having sufficient similarity to a query sequence such that the similarity would not be predicted to have occurred randomly. BLAST reports the identified sequences and their local alignment to the query sequence. As used herein, “percent sequence identity” means the value determined by comparing two aligned sequences over a comparison window, wherein the portion of the polynucleotide sequence in the comparison window may comprise additions or deletions (i.e., gaps) as compared to the reference sequence (which does not comprise additions or deletions) for optimal alignment of the two sequences. The percentage is calculated by determining the number of positions at which the identical nucleic acid base or amino acid residue occurs in both sequences to yield the number of matched positions, dividing the number of matched positions by the total number of positions in the window of comparison, and multiplying the result by 100 to yield the percent sequence identity.

[0368] It is well understood by one skilled in the art that many levels of sequence identity are useful in identifying polypeptides from other species or modified naturally or synthetically wherein such polypeptides have the same or similar function or activity. Useful examples of percent identities include, but are not limited to, 50%, 55%, 60%, 65%, 70%, 75%, 80%, 85%, 90% or 95%, or any integer percentage from 50% to 100%. Indeed, any integer amino acid identity from 50% to 100% may be useful in describing the present disclosure, such as 51%, 52%, 53%, 54%, 55%, 56%, 57%, 58%, 59%, 60%, 61%, 62%, 63%, 64%, 65%, 66%, 67%, 68%, 69%, 70%, 71%, 72%, 73%, 74%, 75%, 76%, 77%, 78%, 79%, 80%, 81%, 82%, 83%, 84%, 85%, 86%, 87%, 88%, 89%, 90%, 91%, 92%, 93%, 94%, 95%, 96%, 97%, 98% or 99%.

[0369] Substantially similar nucleic acid sequences encompassed may be defined by their ability to hybridize (under moderately stringent conditions, e.g., 0.5×SSC, 0.1% SDS, 60° C.) with the sequences exemplified herein, or to any portion of the nucleotide sequences disclosed herein and which are functionally equivalent to any of the nucleic acid sequences disclosed herein. Stringency conditions can be adjusted to screen for moderately similar fragments, such as homologous sequences from distantly related organisms, to highly similar fragments, such as genes that duplicate functional enzymes from closely related organisms. Post-hybridization washes determine stringency conditions.

[0370] The term “selectively hybridizes” includes reference to hybridization, under stringent hybridization conditions, of a nucleic acid sequence to a specified nucleic acid target sequence to a detectably greater degree (e.g., at least 2-fold over background) than its hybridization to non-target nucleic acid sequences and to the substantial exclusion of non-target nucleic acids. Selectively hybridizing sequences typically have about at least 80% sequence identity, or 90% sequence identity, up to and including 100% sequence identity (i.e., fully complementary) with each other.

[0371] The term “stringent conditions” or “stringent hybridization conditions” includes reference to conditions under which a probe will selectively hybridize to its target sequence in an in vitro hybridization assay. Stringent conditions are sequence-dependent and will be different in different circumstances. By controlling the stringency of the hybridization and/or washing conditions, target sequences can be identified which are 100% complementary to the probe (homologous probing). Alternatively, stringency conditions can be adjusted to allow some mismatching in sequences so that lower degrees of similarity are detected (heterologous probing). Generally, a probe is less than about 1000 nucleotides in length, optionally less than 500 nucleotides in length. Typically, stringent conditions will be those in which the salt concentration is less than about 1.5 M Na ion, typically about 0.01 to 1.0 M Na ion concentration (or other salt(s)) at pH 7.0 to 8.3, and at least about 30° C. for short probes (e.g., 10 to 50 nucleotides) and at least about 60° C. for long probes (e.g., greater than 50 nucleotides). Stringent conditions may also be achieved with the addition of destabilizing agents such as formamide. Exemplary low stringency conditions include hybridization with a buffer solution of 30 to 35% formamide, 1 M NaCl, 1% SDS (sodium dodecyl sulfate) at 37° C., and a wash in lx to 2×SSC (20×SSC=3.0 M NaCl/0.3 M trisodium citrate) at 50 to 55° C. Exemplary moderate stringency conditions include hybridization in 40 to 45% formamide, 1 M NaCl, 1% SDS at 37° C., and a wash in 0.5× to 1×SSC at 55 to 60° C. Exemplary high stringency conditions include hybridization in 50% formamide, 1 M NaCl, 1% SDS at 37° C., and a wash in 0.1×SSC at 60 to 65° C.

[0372] By “homology” is meant DNA sequences that are similar. For example, a “region of homology to a genomic region” that is found on the donor DNA is a region of DNA that has a similar sequence to a given “genomic region” in the cell or organism genome. A region of homology can be of any length that is sufficient to promote homologous recombination at the cleaved target site. For example, the region of homology can comprise at least 5-10, 5-15, 5-20, 5-25, 5-30, 5-35, 5-40, 5-45, 5-50, 5-55, 5-60, 5-65, 5-70, 5-75, 5-80, 5-85, 5-90, 5-95, 5-100, 5-200, 5-300, 5-400, 5-500, 5-600, 5-700, 5-800, 5-900, 5-1000, 5-1100, 5-1200, 5-1300, 5-1400, 5-1500, 5-1600, 5-1700, 5-1800, 5-1900, 5-2000, 5-2100, 5-2200, 5-2300, 5-2400, 5-2500, 5-2600, 5-2700, 5-2800, 5-2900, 5-3000, 5-3100 or more bases in length such that the region of homology has sufficient homology to undergo homologous recombination with the corresponding genomic region. “Sufficient homology” indicates that two polynucleotide sequences have sufficient structural similarity to act as substrates for a homologous recombination reaction. The structural similarity includes overall length of each polynucleotide fragment, as well as the sequence similarity of the polynucleotides. Sequence similarity can be described by the percent sequence identity over the whole length of the sequences, and/or by conserved regions comprising localized similarities such as contiguous nucleotides having 100% sequence identity, and percent sequence identity over a portion of the length of the sequences.

[0373] As used herein, an “isolated” polynucleotide or polypeptide, or biologically active portion thereof, is substantially or essentially free from components that normally accompany or interact with the polynucleotide or polypeptide as found in its naturally occurring environment. Thus, an isolated or purified polynucleotide or polypeptide is substantially free of other cellular material or culture media components when produced by recombinant techniques, or substantially free of chemical precursors or other molecules when chemically synthesized. Optimally, an “isolated” polynucleotide is free of sequences (optimally protein encoding sequences) that naturally flank the polynucleotide (i.e., sequences located at the 5′ and 3′ ends of the polynucleotide) in the genomic DNA of the organism from which the polynucleotide is derived. For example, in various embodiments, the isolated polynucleotide can contain less than about 5 kb, 4 kb, 3 kb, 2 kb, 1 kb, 0.5 kb, or 0.1 kb of nucleotide sequence that naturally flank the polynucleotide in genomic DNA of the cell from which the polynucleotide is derived. A polypeptide that is substantially free of cellular material includes preparations of polypeptides having less than about 30%, 20%, 10%, 5%, or 1% (by dry weight) of contaminating protein. When the polypeptide of the invention or biologically active portion thereof is recombinantly produced, optimally culture medium represents less than about 30%, 20%, 10%, 5%, or 1% (by dry weight) of chemical precursors or non-protein-of-interest molecules.

[0374] As used herein, polynucleotide or polypeptide is “recombinant” when it is artificial or engineered, or derived from an artificial or engineered protein or nucleic acid. For example, a polynucleotide that is inserted into a vector or any other heterologous location, e.g., in a genome of another organism, such that it is not associated with nucleotide sequences that normally flank the polynucleotide as it is found in nature is a recombinant polynucleotide. A polypeptide expressed in vitro or in vivo from a recombinant polynucleotide is an example of a recombinant polypeptide. Likewise, a polynucleotide sequence that does not appear in nature, for example, a variant of a naturally occurring gene, is recombinant.

[0375] The terms “recombinant polynucleotide”, “recombinant nucleotide”, “recombinant DNA” and “recombinant DNA construct” are used interchangeably herein. A recombinant construct comprises an artificial or heterologous combination of nucleic acid sequences, e.g., regulatory and coding sequences that are not found together in nature. For example, a transfer cassette can comprise restriction sites and a heterologous polynucleotide of interest. In other embodiments, a recombinant construct may comprise regulatory sequences and coding sequences that are derived from different sources, or regulatory sequences and coding sequences derived from the same source, but arranged in a manner different than that found in nature. Such a construct may be used by itself or may be used in conjunction with a vector. If a vector is used, then the choice of vector is dependent upon the method that will be used to transform host cells as is well known to those skilled in the art. For example, a plasmid vector can be used. The skilled artisan is well aware of the genetic elements that must be present on the vector in order to successfully transform, select and propagate host cells comprising any of the isolated nucleic acid fragments provided herein. The skilled artisan will also recognize that different independent transformation events will result in different levels and patterns of expression (Jones et al., EMBO J. 4:2411-2418 (1985); De Almeida et al., Mol. Gen. Genetics 218:78-86 (1989)), and thus that multiple events must be screened in order to obtain events displaying the desired expression level and pattern. Such screening may be accomplished by Southern analysis of DNA, Northern analysis of mRNA expression, immunoblotting analysis of protein expression, or phenotypic analysis, among others.

[0376] A “centimorgan” (cM) or “map unit” is the distance between two polynucleotide sequences, linked genes, markers, target sites, loci, or any pair thereof, wherein 1% of the products of meiosis are recombinant. Thus, a centimorgan is equivalent to a distance equal to a 1% average recombination frequency between the two linked genes, markers, target sites, loci, or any pair thereof.

[0377] “Open reading frame” is abbreviated ORF.

[0378] “Gene” includes a nucleic acid fragment that expresses a functional molecule such as, but not limited to, a specific protein, including regulatory sequences preceding (5′ non-coding sequences) and following (3′ non-coding sequences) the coding sequence. “Native gene” refers to a gene as found in its natural endogenous location with its own regulatory sequences.

[0379] An “allele” is one of several alternative forms of a gene occupying a given locus on a chromosome. When all the alleles present at a given locus on a chromosome are the same, that plant is homozygous at that locus. If the alleles present at a given locus on a chromosome differ, that plant is heterozygous at that locus.

[0380] “Coding sequence” refers to a polynucleotide sequence which codes for a specific amino acid sequence. “Regulatory sequences” refer to nucleotide sequences located upstream (5′ non-coding sequences), within, or downstream (3′ non-coding sequences) of a coding sequence, and which influence the transcription, RNA processing or stability, or translation of the associated coding sequence. Regulatory sequences include, but are not limited to, promoters, translation leader sequences, 5′ untranslated sequences, 3′ untranslated sequences, introns, polyadenylation target sequences, RNA processing sites, effector binding sites, and stem-loop structures.

[0381] A “mutated gene” is a gene that has been altered through human intervention. Such a “mutated gene” has a sequence that differs from the sequence of the corresponding non-mutated gene by at least one nucleotide addition, deletion, or substitution. In certain embodiments of the disclosure, the mutated gene comprises an alteration that results from a guide polynucleotide/Cas endonuclease system as disclosed herein. A mutated plant is a plant comprising a mutated gene.

[0382] An “intron” is an intervening sequence in a gene that is transcribed into RNA but is then excised in the process of generating the mature mRNA. The term is also used for the excised RNA sequences. An “exon” is a portion of the sequence of a gene that is transcribed and is found in the mature messenger RNA derived from the gene, but is not necessarily a part of the sequence that encodes the final gene product.

[0383] The 5′ untranslated region (5′UTR) (also known as a translational leader sequence or leader RNA) is the region of an mRNA that is directly upstream from the initiation codon. This region is involved in the regulation of translation of a transcript by differing mechanisms in viruses, prokaryotes and eukaryotes.

[0384] A “promoter” is a region of DNA involved in recognition and binding of RNA polymerase and other proteins to initiate transcription. The promoter sequence consists of proximal and more distal upstream elements, the latter elements often referred to as enhancers. An “enhancer” is a DNA sequence that can stimulate promoter activity, and may be an innate element of the promoter or a heterologous element inserted to enhance the level or tissue-specificity of a promoter. Promoters may be derived in their entirety from a native gene, or be composed of different elements derived from different promoters found in nature, and/or comprise synthetic DNA segments. It is understood by those skilled in the art that different promoters may direct the expression of a gene in different tissues or cell types, or at different stages of development, or in response to different environmental conditions. It is further recognized that since in most cases the exact boundaries of regulatory sequences have not been completely defined, DNA fragments of some variation may have identical promoter activity.

[0385] Promoters that cause a gene to be expressed in most cell types at most times are commonly referred to as “constitutive promoters”. The term “inducible promoter” refers to a promoter that selectively express a coding sequence or functional RNA in response to the presence of an endogenous or exogenous stimulus, for example by chemical compounds (chemical inducers) or in response to environmental, hormonal, chemical, and/or developmental signals. Inducible or regulated promoters include, for example, promoters induced or regulated by light, heat, stress, flooding or drought, salt stress, osmotic stress, phytohormones, wounding, or chemicals such as ethanol, abscisic acid (ABA), jasmonate, salicylic acid, or safeners.

[0386] “Translation leader sequence” refers to a polynucleotide sequence located between the promoter sequence of a gene and the coding sequence. The translation leader sequence is present in the mRNA upstream of the translation start sequence. The translation leader sequence may affect processing of the primary transcript to mRNA, mRNA stability or translation efficiency. Examples of translation leader sequences have been described (e.g., Turner and Foster, (1995) Mol Biotechnol 3:225 236).

[0387] “3′ non-coding sequences”, “transcription terminator” or “termination sequences” refer to DNA sequences located downstream of a coding sequence and include polyadenylation recognition sequences and other sequences encoding regulatory signals capable of affecting mRNA processing or gene expression. The polyadenylation signal is usually characterized by affecting the addition of polyadenylic acid tracts to the 3′ end of the mRNA precursor. The use of different 3′ non-coding sequences is exemplified by Ingelbrecht et al., (1989) Plant Cell 1:671-680.

[0388] “RNA transcript” refers to the product resulting from RNA polymerase-catalyzed transcription of a DNA sequence. When the RNA transcript is a perfect complimentary copy of the DNA sequence, it is referred to as the primary transcript or pre-mRNA. A RNA transcript is referred to as the mature RNA or mRNA when it is a RNA sequence derived from post-transcriptional processing of the primary transcript pre-mRNA. “Messenger RNA” or “mRNA” refers to the RNA that is without introns and that can be translated into protein by the cell. “cDNA” refers to a DNA that is complementary to, and synthesized from, an mRNA template using the enzyme reverse transcriptase. The cDNA can be single-stranded or converted into double-stranded form using the Klenow fragment of DNA polymerase I. “Sense” RNA refers to RNA transcript that includes the mRNA and can be translated into protein within a cell or in vitro. “Antisense RNA” refers to an RNA transcript that is complementary to all or part of a target primary transcript or mRNA, and that blocks the expression of a target gene (see, e.g., U.S. Pat. No. 5,107,065). The complementarity of an antisense RNA may be with any part of the specific gene transcript, i.e., at the 5′ non-coding sequence, 3′ non-coding sequence, introns, or the coding sequence. “Functional RNA” refers to antisense RNA, ribozyme RNA, or other RNA that may not be translated yet has an effect on cellular processes. The terms “complement” and “reverse complement” are used interchangeably herein with respect to mRNA transcripts, and are meant to define the antisense RNA of the message.

[0389] The terms “5′-cap” and “7-methylguanylate (m7G) cap” are used interchangeably herein. A 7-methylguanylate residue is located on the 5′ terminus of messenger RNA (mRNA) in eukaryotes. RNA polymerase II (Pol II) transcribes mRNA in eukaryotes. Messenger RNA capping occurs generally as follows: The most terminal 5′ phosphate group of the mRNA transcript is removed by RNA terminal phosphatase, leaving two terminal phosphates. A guanosine monophosphate (GMP) is added to the terminal phosphate of the transcript by a guanylyl transferase, leaving a 5′-5′ triphosphate-linked guanine at the transcript terminus. Finally, the 7-nitrogen of this terminal guanine is methylated by a methyl transferase.

[0390] The terminology “not having a 5′-cap” herein is used to refer to RNA having, for example, a 5′-hydroxyl group instead of a 5′-cap. Such RNA can be referred to as “uncapped RNA”, for example. Uncapped RNA can better accumulate in the nucleus following transcription, since 5′-capped RNA is subject to nuclear export. One or more RNA components herein are uncapped.

[0391] The term “operably linked” refers to the association of nucleic acid sequences on a single nucleic acid fragment so that the function of one is regulated by the other. For example, a promoter is operably linked with a coding sequence when it is capable of regulating the expression of that coding sequence (i.e., the coding sequence is under the transcriptional control of the promoter). Coding sequences can be operably linked to regulatory sequences in a sense or antisense orientation. In another example, the complementary RNA regions can be operably linked, either directly or indirectly, 5′ to the target mRNA, or 3′ to the target mRNA, or within the target mRNA, or a first complementary region is 5′ and its complement is 3′ to the target mRNA.

[0392] The term “expression”, as used herein, refers to the production of a functional end-product (e.g., an mRNA, guide RNA, or a protein) in either precursor or mature form.

[0393] By “domain” it is meant a contiguous stretch of nucleotides (that can be RNA, DNA, and/or RNA-DNA-combination sequence) or amino acids.

[0394] The term “conserved domain” or “motif” means a set of polynucleotides or amino acids conserved at specific positions along an aligned sequence of evolutionarily related proteins. While amino acids at other positions can vary between homologous proteins, amino acids that are highly conserved at specific positions indicate amino acids that are essential to the structure, the stability, or the activity of a protein. Because they are identified by their high degree of conservation in aligned sequences of a family of protein homologues, they can be used as identifiers, or “signatures”, to determine if a protein with a newly determined sequence belongs to a previously identified protein family.

[0395] The term “fragment” refers to a contiguous set of polynucleotides or polypeptides. In one embodiment, a fragment is 2, 3, 4, 5, 6, 7 8, 9, 10, 11, 12, 13, 14, 15, 16, 17, 18, 19, 20, or greater than 20 contiguous polynucleotides. In one embodiment, a fragment is 2, 3, 4, 5, 6, 7 8, 9, 10, 11, 12, 13, 14, 15, 16, 17, 18, 19, 20, or greater than 20 contiguous polypeptides. A fragment may or may not exhibit the function of a sequence sharing some percent identity over the length of said fragment.

[0396] The terms “fragment that is functionally equivalent”, “functional fragment”, and “functionally equivalent fragment” are used interchangeably herein. These terms refer to a portion or subsequence of a nucleic acid fragment or polypeptide that displays the same activity or function as the longer sequence from which it derives. In one example, the fragment retains the ability to alter gene expression, create a double strand nick or break, or produce a certain phenotype whether or not the fragment encodes the whole protein as found in nature. In some aspects, part of the activity is retained. In some aspects, all of the activity is retained.

[0397] The terms “variant that is functionally equivalent”, “functional variant”, and “functionally equivalent variant” are used interchangeably herein. These terms refer to a nucleic acid fragment or polypeptide that displays the same activity or function as the source sequence from which it derives, but differs from the source sequence by at least one nucleotide or amino acid. In one example, the variant retains the ability to alter gene expression, create a double strand nick or break, or produce a certain phenotype. In some aspects, part of the activity is retained. In some aspects, all of the activity is retained.

[0398] A functional fragment or functional variant shares at least 50%, between 50% and 55%, at least 55%, between 55% and 60%, at least 60%, between 60% and 65%, at least 65%, between 65% and 70%, at least 70%, between 70% and 75%, at least 75%, between 75% and 80%, at least 80%, between 80% and 85%, at least 85%, between 85% and 90%, at least 90%, between 90% and 95%, at least 95%, between 95% and 96%, at least 96%, between 96% and 97%, at least 97%, between 97% and 98%, at least 98%, between 98% and 99%, at least 99%, between 99% and 100%, or 100% sequence identity with at least 50, between 50 and 100, at least 100, between 100 and 150, at least 150, between 150 and 200, at least 200, between 200 and 250, at least 250, between 250 and 300, at least 300, between 300 and 350, at least 350, between 350 and 400, at least 400, between 400 and 450, at least 500, or greater than 500 contiguous amino acids of a native source polynucleotide or polypeptide, and retains at least partial activity.

[0399] “Modified”, “edited”, or “altered, with respect to a polynucleotide or target sequence, refers to a nucleotide sequence that comprises at least one alteration when compared to its non-modified nucleotide sequence. Such “alterations” include, for example: (i) replacement of at least one nucleotide, (ii) a deletion of at least one nucleotide, (iii) an insertion of at least one nucleotide, (iv) association of another molecule or atom via covalent, ionic, or hydrogen bonding, or (v) any combination of (i)-(iv).

[0400] Proteins may be altered in various ways including amino acid substitutions, deletions, truncations, and insertions. Methods for such manipulations are generally known. For example, amino acid sequence variants of the protein(s) can be prepared by mutations in the DNA. Methods for mutagenesis and nucleotide sequence alterations include, for example, Kunkel, (1985) Proc. Natl. Acad. Sci. USA 82:488-92; Kunkel et al., (1987) Meth Enzymol 154:367-82; U.S. Pat. No. 4,873,192; Walker and Gaastra, eds. (1983) Techniques in Molecular Biology (MacMillan Publishing Company, New York) and the references cited therein. Guidance regarding amino acid substitutions not likely to affect biological activity of the protein is found, for example, in the model of Dayhoff et al., (1978) Atlas of Protein Sequence and Structure (Natl Biomed Res Found, Washington, D.C.). Conservative substitutions, such as exchanging one amino acid with another having similar properties, may be preferable. Conservative deletions, insertions, and amino acid substitutions are not expected to produce radical changes in the characteristics of the protein, and the effect of any substitution, deletion, insertion, or combination thereof can be evaluated by routine screening assays. Assays for double-strand-break-inducing activity are known and generally measure the overall activity and specificity of the agent on DNA substrates comprising target sites.

[0401] A “mature” protein refers to a post-translationally processed polypeptide (i.e., one from which any pre- or propeptides present in the primary translation product have been removed).

[0402] “Precursor” protein refers to the primary product of translation of mRNA (i.e., with pre- and propeptides still present). Pre- and propeptides may be but are not limited to intracellular localization signals.

[0403] An “optimized” polynucleotide is a sequence that has been optimized for improved expression in a particular heterologous host cell.

[0404] A “codon-modified gene” or “codon-preferred gene” or “codon-optimized gene” is a gene having its frequency of codon usage designed to mimic the frequency of preferred codon usage of the host cell.

[0405] A “plant-optimized nucleotide sequence” is a nucleotide sequence that has been optimized for expression in plants, particularly for increased expression in plants. A plant-optimized nucleotide sequence includes a codon-optimized gene. A plant-optimized nucleotide sequence can be synthesized by modifying a nucleotide sequence encoding a protein such as, for example, a Cas endonuclease as disclosed herein, using one or more plant-preferred codons for improved expression. See, for example, Campbell and Gown (1990) Plant Physiol. 92:1-11 for a discussion of host-preferred codon usage.

[0406] The terms “plasmid”, “vector” and “cassette” refer to a linear or circular extra chromosomal element often carrying genes that are not part of the central metabolism of the cell, and usually in the form of double-stranded DNA. Such elements may be autonomously replicating sequences, genome integrating sequences, phage, or nucleotide sequences, in linear or circular form, of a single- or double-stranded DNA or RNA, derived from any source, in which a number of nucleotide sequences have been joined or recombined into a unique construction which is capable of introducing a polynucleotide of interest into a cell. “Transformation cassette” refers to a specific vector comprising a gene and having elements in addition to the gene that facilitates transformation of a particular host cell. “Expression cassette” refers to a specific vector comprising a gene and having elements in addition to the gene that allow for expression of that gene in a host.

[0407] A “polynucleotide of interest” includes any nucleotide sequence encoding a protein or polypeptide that improves desirability of an organism, for example, animals or plants. Polynucleotides of interest: include, but are not limited to, polynucleotides encoding important traits for agronomics, herbicide-resistance, insecticidal resistance, disease resistance, nematode resistance, herbicide resistance, microbial resistance, fungal resistance, viral resistance, fertility or sterility, grain characteristics, commercial products, phenotypic marker, or any other trait of agronomic or commercial importance. A polynucleotide of interest may additionally be utilized in either the sense or anti-sense orientation. Further, more than one polynucleotide of interest may be utilized together, or “stacked”, to provide additional benefit.

[0408] As used herein, a “genomic region of interest” is a segment of a chromosome in the genome of a plant that is desirable for introducing a double-strand break, a polynucleotide of interest, or a trait of interest. The genomic region of interest can include, for example, one or more polynucleotides of interest. Generally, a genomic region of interest of the present invention comprises a segment of chromosome that is 0-15 centimorgan (cM).

[0409] The terms “knock-out”, “gene knock-out” and “genetic knock-out” are used interchangeably herein. A knock-out represents a DNA sequence of a cell that has been rendered partially or completely inoperative by targeting with a DSB agent; for example, a DNA sequence prior to knock-out could have encoded an amino acid sequence, or could have had a regulatory function (e.g., promoter).

[0410] The terms “knock-in”, “gene knock-in”, “gene insertion” and “genetic knock-in” are used interchangeably herein. A knock-in represents the replacement or insertion of a DNA sequence at a specific DNA sequence in cell by targeting with a DSB agent (for example by homologous recombination (HR), wherein a suitable donor DNA polynucleotide is also used). Examples of knock-ins are a specific insertion of a heterologous amino acid coding sequence in a coding region of a gene, or a specific insertion of a transcriptional regulatory element in a genetic locus.

[0411] Generally, “host” refers to an organism or cell into which a heterologous component (polynucleotide, polypeptide, other molecule, cell) has been introduced. As used herein, a “host cell” refers to an in vivo or in vitro eukaryotic cell, prokaryotic cell (e.g., bacterial or archaeal cell), or cell from a multicellular organism (e.g., a cell line) cultured as a unicellular entity, into which a heterologous polynucleotide or polypeptide has been introduced. In some embodiments, the cell is selected from the group consisting of: an archaeal cell, a bacterial cell, a eukaryotic cell, a eukaryotic single-cell organism, a somatic cell, a germ cell, a stem cell, a plant cell, an algal cell, an animal cell, in invertebrate cell, a vertebrate cell, a fish cell, a frog cell, a bird cell, an insect cell, a mammalian cell, a pig cell, a cow cell, a goat cell, a sheep cell, a rodent cell, a rat cell, a mouse cell, a non-human primate cell, and a human cell. In some cases, the cell is in vitro. In some cases, the cell is in vivo.

[0412] As used herein, the terms “target site”, “target sequence”, and “target polynucleotide” are used interchangeably herein and refer to a polynucleotide sequence in the genome of a plant cell or yeast cell that comprises a recognition site for a double-strand-break-inducing agent.

[0413] A “target cell” is a cell that comprises a target sequence and is the object for receipt of a particular double-strand-break-inducing agent.

[0414] A “break-inducing agent” is a composition that creates a cleavage in at least one strand of a polynucleotide. In some aspect, a break-inducing agent may be capable of, or have its activity altered such that it is capable of, creating a break in only one strand of a polynucleotide. Producing a single-strand-break in a double-stranded target sequence may be referred to herein as “nicking” the target sequence.

[0415] The term “double-strand-break-inducing agent”, or equivalently “double-strand-break agent” or “DSB agent”, as used herein refers to any composition which produces a double-strand break in a target polynucleotide sequence; that is, creates a break in both strands of a double stranded polynucleotide. Examples of a DSB agent include, but are not limited to: meganucleases, TAL effector nucleases, Argonautes, Zinc Finger nucleases, and Cas endonucleases (either individually or as part of a ribonucleoprotein complex). Producing the double-strand break in a target sequence may be referred to herein as “cutting” or “cleaving” the target sequence. In some aspects, the DSB agent is a nuclease. In some aspects, the DSB agent is an endonuclease. An “endonuclease” refers to an enzyme that cleaves the phosphodiester bond within a polynucleotide chain. In some embodiments, the double-strand break results in a “blunt” end of a double-stranded polynucleotide, wherein both strands are cut directly across from each other with no nucleotide overhang generated. A “blunt” end cut of a double-stranded polynucleotide is created when a first cleavage of the first stand polynucleotide backbone occurs between a first set of two nucleotides on one strand, and a second cleavage of the second strand polynucleotide backbone occurs between a second set of two nucleotides on the opposite strand, wherein each of the two nucleotides of the first set are hydrogen bonded to one of the two nucleotides of the second set, resulting in cut strands with no nucleotide on the cleaved end that is not hydrogen bonded to another nucleotide on the opposite strand. In some embodiments, the double-strand break results in a “sticky” end of a double-stranded polynucleotide, wherein cuts are made between nucleotides of dissimilar relative positions on each of the two strands, resulting in a polynucleotide overhang of one strand compared to the other. A “sticky” end cut of a double-stranded polynucleotide is created when a first cleavage of the first strand polynucleotide backbone occurs between a first set of two nucleotides on one strand, and a second cleavage of the second strand polynucleotide backbone occurs between a second set of two nucleotides on the opposite strand, wherein no more than one nucleotide of the first set is hydrogen bonded to one of the nucleotides of the second set on the opposite strand, resulting in an “overhang” of at least one polynucleotide on one of the two strands wherein the lengths of the two resulting cut strands are not identical. In some embodiments, the DSB agent comprises more than one type of molecule. In one non-limiting example, the DSB agent comprises an endonuclease protein and a polynucleotide, for example a Cas endonuclease and a guide RNA. In some aspects, the DSB agent is a fusion protein comprising a plurality of polypeptides. In one non-limiting example, the DSB agent is a Cas endonuclease with a deactivated nuclease domain, and another polypeptide with nuclease activity.

[0416] As used herein, the term “recognition site” refers to a polynucleotide sequence to which a double-strand-break-inducing agent is capable of alignment, and may optionally contact, bind, and/or effect a double-strand break. The terms “recognition site” and “recognition sequence” are used interchangeably herein. The recognition site can be an endogenous site in a host (such as a yeast, animal, or plant) genome, or alternatively, the recognition site can be heterologous to the host (yeast, animal, or plant) and thereby not be naturally occurring in the genome, or the recognition site can be found in a heterologous genomic location compared to where it occurs in nature. The length and the composition of a recognition site can be characteristic of, and may be specific to, a particular double-strand-break-inducing agent. The cleavage site of a DSB agent may be the same or different than the recognition site, and may be the same or different than the binding site.

[0417] As used herein, the term “endogenous recognition (or binding or cleavage) site” refers to a double-strand-break-inducing agent recognition (or binding or cleavage) site that is endogenous or native to the genome of a host (such as a plant, animal, or yeast) and is located at the endogenous or native position of that recognition (or binding or cleavage) site in the genome of the host (such as a plant, animal, or yeast). The length of the recognition (or binding or cleavage) site can vary, and includes, for example, recognition (or binding or cleavage) sites that are at least 1, 2, 3, 4, 5, 6, 7, 8, 9, 10, 11, 12, 13, 14, 15, 16, 17. 18, 19, 20, 21, 22, 23, 24, 25, 26, 27, 28, 29, 30, 31, 32, 33, 34, 35, 36, 37, 38, 39, 40, 41, 42, 43, 44, 45, 46, 47, 48, 49, 50, 51, 52, 53, 54, 55, 56, 57, 58, 59, 60, 61, 62, 63, 64, 65, 66, 67, 68, 69, 70, or more than 70 nucleotides in length. The composition of the recognition (or binding or cleavage) site can vary, and includes, for example, a plurality of specific nucleotides whose compositions are recognized by the DSB agent. In some aspects, the plurality of specific nucleotides is contiguous in the primary sequence. In some aspects, the plurality of specific nucleotides is non-contiguous in the primary sequence. It is further possible that the recognition site could be palindromic, that is, the sequence on one strand reads the same in the opposite direction on the complementary strand. The binding and/or nick/cleavage site could be within the recognition sequence or the binding and/or nick/cleavage site could be outside of the recognition sequence. In another variation, the DSB cleavage could occur at nucleotide positions immediately opposite each other to produce a blunt end cut or, in other cases, the incisions could be staggered to produce single-stranded overhangs, also called “sticky ends”, which can be either 5′ overhangs, or 3′ overhangs.

[0418] As used herein, the term “target recognition site” refers to the polynucleotide sequence to which a double-strand-break-inducing agent is capable of aligning perfectly (i.e., zero nucleotide mismatches, gaps, or insertions), and in some aspects, induces a double-strand break.

[0419] As used herein, the term “target binding site” refers to the polynucleotide sequence at which the double-strand-break-inducing agent is capable of forming a functional association, and to which it forms bonds with complementary nucleotides of the target polynucleotide strand, with perfect alignment (i.e., zero nucleotide mismatches, gaps, or insertions).

[0420] As used herein, the term “target cleavage site” refers to the polynucleotide sequence at which a double-strand-break-inducing agent is capable of producing a double-strand break, with perfect alignment (i.e., zero nucleotide mismatches, gaps, or insertions).

[0421] “CRISPR” (Clustered Regularly Interspaced Short Palindromic Repeats) loci refers to certain genetic loci encoding components of DNA cleavage systems, for example, used by bacterial and archaeal cells to destroy foreign DNA (Horvath and Barrangou, 2010, Science 327:167-170; WO2007025097, published 1 Mar. 2007). A CRISPR locus can consist of a CRISPR array, comprising short direct repeats (CRISPR repeats) separated by short variable DNA sequences (called spacers), which can be flanked by diverse Cas (CRISPR-associated) genes.

[0422] The term “Cas protein” refers to a polypeptide encoded by a Cas (CRISPR-associated) gene. A Cas protein includes but is not limited to: the novel Cas-delta protein disclosed herein, a Cas9 protein, a Cpf1 (Cas12) protein, a C2c1 protein, a C2c2 protein, a C2c3 protein, Cas3, Cas3-HD, Cas 5, Cas7, Cas8, Cas10, or combinations or complexes of these. A Cas protein may be a “Cas endonuclease” or “Cas effector protein”, that when in complex with a suitable polynucleotide component, is capable of recognizing, binding to, and optionally nicking or cleaving all or part of a specific polynucleotide target sequence. A Cas endonuclease described herein comprises one or more nuclease domains. The Cas-delta endonucleases of the disclosure may include those having RuvC or RuvC-like nuclease domains. A Cas protein is further defined as a functional fragment or functional variant of a native Cas protein, or a protein that shares at least 50%, between 50% and 55%, at least 55%, between 55% and 60%, at least 60%, between 60% and 65%, at least 65%, between 65% and 70%, at least 70%, between 70% and 75%, at least 75%, between 75% and 80%, at least 80%, between 80% and 85%, at least 85%, between 85% and 90%, at least 90%, between 90% and 95%, at least 95%, between 95% and 96%, at least 96%, between 96% and 97%, at least 97%, between 97% and 98%, at least 98%, between 98% and 99%, at least 99%, between 99% and 100%, or 100% sequence identity with at least 50, between 50 and 100, at least 100, between 100 and 150, at least 150, between 150 and 200, at least 200, between 200 and 250, at least 250, between 250 and 300, at least 300, between 300 and 350, at least 350, between 350 and 400, at least 400, between 400 and 450, at least 500, or greater than 500 contiguous amino acids of a native Cas protein, and retains at least partial activity.

[0423] As used herein, the term “guide polynucleotide”, relates to a polynucleotide sequence that can form a complex with a Cas endonuclease, including the Cas endonuclease described herein, and enables the Cas endonuclease to recognize, optionally bind to, and optionally cleave a DNA target site. The guide polynucleotide sequence can be a RNA sequence, a DNA sequence, or a combination thereof (a RNA-DNA combination sequence).

[0424] The terms “single guide RNA” and “sgRNA” are used interchangeably herein and relate to a synthetic fusion of two RNA molecules, a crRNA (CRISPR RNA) comprising a variable targeting domain (linked to a tracr mate sequence that hybridizes to a tracrRNA), fused to a tracrRNA (trans-activating CRISPR RNA). The single guide RNA can comprise a crRNA or crRNA fragment and a tracrRNA or tracrRNA fragment of the type II CRISPR/Cas system that can form a complex with a type II Cas endonuclease, wherein said guide RNA/Cas endonuclease complex can direct the Cas endonuclease to a DNA target site, enabling the Cas endonuclease to recognize, optionally bind to, and optionally nick or cleave (introduce a single or double-strand break) the DNA target site.

[0425] The term “Cas endonuclease recognition domain” or “CER domain” (of a guide polynucleotide) is used interchangeably herein and includes a nucleotide sequence that interacts with a Cas endonuclease polypeptide. A CER domain comprises a (trans-acting) tracrNucleotide mate sequence followed by a tracrNucleotide sequence. The CER domain can be composed of a DNA sequence, a RNA sequence, a modified DNA sequence, a modified RNA sequence (see for example US20150059010A1, published 26 Feb. 2015), or any combination thereof.

[0426] As used herein, the terms “guide polynucleotide/Cas endonuclease complex”, “guide polynucleotide/Cas endonuclease system”, “guide polynucleotide/Cas complex”, “guide polynucleotide/Cas system” and “guided Cas system” “Polynucleotide-guided endonuclease”, “PGEN” are used interchangeably herein and refer to at least one guide polynucleotide and at least one Cas endonuclease, that are capable of forming a complex, wherein said guide polynucleotide/Cas endonuclease complex can direct the Cas endonuclease to a DNA target site, enabling the Cas endonuclease to recognize, bind to, and optionally nick or cleave (introduce a single or double-strand break) the DNA target site. A guide polynucleotide/Cas endonuclease complex herein can comprise Cas protein(s) and suitable polynucleotide component(s) of any of the known CRISPR systems (Horvath and Barrangou, 2010, Science 327:167-170; Makarova et al. 2015, Nature Reviews Microbiology Vol. 13:1-15; Zetsche et al., 2015, Cell 163, 1-13; Shmakov et al., 2015, Molecular Cell 60, 1-13).

[0427] The terms “guide RNA/Cas endonuclease complex”, “guide RNA/Cas endonuclease system”, “guide RNA/Cas complex”, “guide RNA/Cas system”, “gRNA/Cas complex”, “gRNA/Cas system”, “RNA-guided endonuclease”, “RGEN” are used interchangeably herein and refer to at least one RNA component and at least one Cas endonuclease that are capable of forming a complex, wherein said guide RNA/Cas endonuclease complex can direct the Cas endonuclease to a DNA target site, enabling the Cas endonuclease to recognize, bind to, and optionally nick or cleave (introduce a single or double-strand break) the DNA target site.

[0428] A “protospacer adjacent motif” (PAM) herein refers to a short nucleotide sequence adjacent to a target sequence (protospacer) that is recognized (targeted) by a guide polynucleotide/Cas endonuclease system described herein. The Cas endonuclease may not successfully recognize a target DNA sequence if the target DNA sequence is not followed by a PAM sequence. The sequence and length of a PAM herein can differ depending on the Cas protein or Cas protein complex used. The PAM sequence can be of any length but is typically 1, 2, 3, 4, 5, 6, 7, 8, 9, 10, 11, 12, 13, 14, 15, 16, 17, 18, 19 or 20 nucleotides long.

[0429] As used herein, “donor DNA” is a DNA construct that comprises a polynucleotide of interest to be inserted into the target site of a Cas endonuclease.

[0430] The term “polynucleotide modification template” includes a polynucleotide that comprises at least one nucleotide modification when compared to the nucleotide sequence to be edited. A nucleotide modification can be at least one nucleotide substitution, addition or deletion. Optionally, the polynucleotide modification template can further comprise homologous nucleotide sequences flanking the at least one nucleotide modification, wherein the flanking homologous nucleotide sequences provide sufficient homology to the desired nucleotide sequence to be edited.

[0431] As used herein, “homologous recombination” (HR) includes the exchange of DNA fragments between two DNA molecules at the sites of homology. The frequency of homologous recombination is influenced by a number of factors. Different organisms vary with respect to the amount of homologous recombination and the relative proportion of homologous to non-homologous recombination. Generally, the length of the region of homology affects the frequency of homologous recombination events: the longer the region of homology, the greater the frequency. The length of the homology region needed to observe homologous recombination is also species-variable. In many cases, at least 5 kb of homology has been utilized, but homologous recombination has been observed with as little as 25-50 bp of homology. See, for example, Singer et al., (1982) Cell 31:25-33; Shen and Huang, (1986) Genetics 112:441-57; Watt et al., (1985) Proc. Natl. Acad. Sci. USA 82:4768-72, Sugawara and Haber, (1992) Mol Cell Biol 12:563-75, Rubnitz and Subramani, (1984) Mol Cell Biol 4:2253-8; Ayares et al., (1986) Proc. Natl. Acad. Sci. USA 83:5199-203; Liskay et al., (1987) Genetics 115:161-7.

[0432] The term “plant” generically includes whole plants, plant organs, plant tissues, seeds, plant cells, seeds and progeny of the same. Plant cells include, without limitation, cells from seeds, suspension cultures, embryos, meristematic regions, callus tissue, leaves, roots, shoots, gametophytes, sporophytes, pollen and microspores. A “plant element” is intended to reference either a whole plant or a plant component, which may comprise differentiated and/or undifferentiated tissues, for example but not limited to plant tissues, parts, and cell types. In one embodiment, a plant element is one of the following: whole plant, seedling, meristematic tissue, ground tissue, vascular tissue, dermal tissue, seed, leaf, root, shoot, stem, flower, fruit, stolon, bulb, tuber, corm, keiki, shoot, bud, tumor tissue, and various forms of cells and culture (e.g., single cells, protoplasts, embryos, callus tissue). The term “plant organ” refers to plant tissue or a group of tissues that constitute a morphologically and functionally distinct part of a plant. As used herein, a “plant element” is synonymous to a “portion” of a plant, and refers to any part of the plant, and can include distinct tissues and/or organs, and may be used interchangeably with the term “tissue” throughout. Similarly, a “plant reproductive element” is intended to generically reference any part of a plant that is able to initiate other plants via either sexual or asexual reproduction of that plant, for example but not limited to: seed, seedling, root, shoot, cutting, scion, graft, stolon, bulb, tuber, corm, keiki, or bud. The plant element may be in plant or in a plant organ, tissue culture, or cell culture.

[0433] “Progeny” comprises any subsequent generation of an organism, produced via sexual or asexual reproduction.

[0434] As used herein, the term “plant part” refers to plant cells, plant protoplasts, plant cell tissue cultures from which plants can be regenerated, plant calli, plant clumps, and plant cells that are intact in plants or parts of plants such as embryos, pollen, ovules, seeds, leaves, flowers, branches, fruit, kernels, ears, cobs, husks, stalks, roots, root tips, anthers, and the like, as well as the parts themselves. Grain is intended to mean the mature seed produced by commercial growers for purposes other than growing or reproducing the species. Progeny, variants, and mutants of the regenerated plants are also included within the scope of the invention, provided that these parts comprise the introduced polynucleotides.

[0435] The term “monocotyledonous” or “monocot” refers to the subclass of angiosperm plants also known as “monocotyledoneae”, whose seeds typically comprise only one embryonic leaf, or cotyledon. The term includes references to whole plants, plant elements, plant organs (e.g., leaves, stems, roots, etc.), seeds, plant cells, and progeny of the same.

[0436] The term “dicotyledonous” or “dicot” refers to the subclass of angiosperm plants also knows as “dicotyledoneae”, whose seeds typically comprise two embryonic leaves, or cotyledons. The term includes references to whole plants, plant elements, plant organs (e.g., leaves, stems, roots, etc.), seeds, plant cells, and progeny of the same.

[0437] The term “crossed” or “cross” or “crossing” in the context of this disclosure means the fusion of gametes via pollination to produce progeny (i.e., cells, seeds, or plants). The term encompasses both sexual crosses (the pollination of one plant by another) and selfing (self-pollination, i.e., when the pollen and ovule (or microspores and megaspores) are from the same plant or genetically identical plants).

[0438] The term “introgression” refers to the transmission of a desired allele of a genetic locus from one genetic background to another. For example, introgression of a desired allele at a specified locus can be transmitted to at least one progeny plant via a sexual cross between two parent plants, where at least one of the parent plants has the desired allele within its genome. Alternatively, for example, transmission of an allele can occur by recombination between two donor genomes, e.g., in a fused protoplast, where at least one of the donor protoplasts has the desired allele in its genome. The desired allele can be, e.g., a transgene, a modified (mutated or edited) native allele, or a selected allele of a marker or QTL.

[0439] The term “isoline” is a comparative term, and references organisms that are genetically identical, but differ in treatment. In one example, two genetically identical maize plant embryos may be separated into two different groups, one receiving a treatment (such as the introduction of a CRISPR-Cas effector endonuclease) and one control that does not receive such treatment. Any phenotypic differences between the two groups may thus be attributed solely to the treatment and not to any inherency of the plant's endogenous genetic makeup.

[0440] The compositions and methods herein may provide for an improved “agronomic trait” or “trait of agronomic importance” or “trait of agronomic interest” to a plant, which may include, but not be limited to, the following: disease resistance, drought tolerance, heat tolerance, cold tolerance, salinity tolerance, metal tolerance, herbicide tolerance, improved water use efficiency, improved nitrogen utilization, improved nitrogen fixation, stay-green, senescence, pest resistance, herbivore resistance, pathogen resistance, yield improvement, health enhancement, vigor improvement, growth improvement, photosynthetic capability improvement, nutrition enhancement, altered protein content, altered oil content, increased biomass, increased shoot length, increased root length, improved root architecture, modulation of a metabolite, modulation of the proteome, increased seed weight, altered seed carbohydrate composition, altered seed oil composition, altered seed protein composition, altered seed nutrient composition, as compared to an isoline plant not comprising a modification derived from the methods or compositions herein.

[0441] “Agronomic trait potential” is intended to mean a capability of a plant element for exhibiting a phenotype, preferably an improved agronomic trait, at some point during its life cycle, or conveying said phenotype to another plant element with which it is associated in the same plant.

[0442] “Stay-green” or “staygreen” is a term used to describe a plant phenotype, e.g., whereby leaf senescence (most easily distinguished by yellowing of leaf associated with chlorophyll degradation) is delayed compared to a standard reference or a control. The staygreen phenotype has been used as selective criterion for the development of improved varieties of crop plants such as corn, rice and sorghum, particularly with regard to the development of stress tolerance, and yield enhancement (Borrell et al. (2000b) Crop Sci. 40:1037-1048; Spano et al, (2003) J. Exp. Bot. 54:1415-1420; Christopher et al, (2008) Aust. J. Agric. Res. 59:354-364, 2008, Kashiwagi et al (2006) Plant Physiology and Biochemistry 44:152-157, 2006 and Zheng et al, (2009) Plant Breed 725:54-62.

[0443] “Increase in staygreen phenotype” as referred to in here, indicates retention of green leaves, delayed foliar senescence and significantly healthier canopy in a plant, compared to control plant.

[0444] Staygreen plants have been categorized broadly into “cosmetic staygreen” and “functional staygreen”. In plants exhibiting cosmetic staygreen phenotype, the primary lesion of senescence is confined to pigment catabolism. In plants exhibiting functional staygreen phenotype the entire senescence syndrome, of which chlorophyll catabolism is only one component, is delayed or slowed down, or both. The functional staygreen trait has been shown to be associated with the transition from the carbon (C) capture to the nitrogen (N) mobilization phase of foliar development (Thomas and Oughan (2014) J Exp Bot. Vol. 65 (14), pp. 3889-3900; Kusaba et al (2013) Photosynth Res 117:221-234; Thomas and Howarth (2000) J Exp Bot. Vol. 51, pp. 329-337.

[0445] The terms “decreased,” “fewer,” “slower” and “increased” “faster” “enhanced” “greater” as used herein refers to a decrease or increase in a characteristic of the modified plant element or resulting plant compared to an unmodified plant element or resulting plant. For example, a decrease in a characteristic may be at least 1%, at least 2%, at least 3%, at least 4%, at least 5%, between 5% and 10%, at least 10%, between 10% and 20%, at least 15%, at least 20%, between 20% and 30%, at least 25%, at least 30%, between 30% and 40%, at least 35%, at least 40%, between 40% and 50%, at least 45%, at least 50%, between 50% and 60%, at least about 60%, between 60% and 70%, between 70% and 80%, at least 75%, at least about 80%, between 80% and 90%, at least about 90%, between 90% and 100%, at least 100%, between 100% and 200%, at least 200%, at least about 300%, at least about 400%) or more lower than the untreated control and an increase may be at least 1%, at least 2%, at least 3%, at least 4%, at least 5%, between 5% and 10%, at least 10%, between 10% and 20%, at least 15%, at least 20%, between 20% and 30%, at least 25%, at least 30%, between 30% and 40%, at least 35%, at least 40%, between 40% and 50%, at least 45%, at least 50%, between 50% and 60%, at least about 60%, between 60% and 70%, between 70% and 80%, at least 75%, at least about 80%, between 80% and 90%, at least about 90%, between 90% and 100%, at least 100%, between 100% and 200%, at least 200%, at least about 300%), at least about 400% or more higher than the control.

[0446] The meaning of abbreviations is as follows: “sec” means second(s), “min” means minute(s), “h” means hour(s), “d” means day(s), “μL” means microliter(s), “mL” means milliliter(s), “L” means liter(s), “μM” means micromolar, “mM” means millimolar, “M” means molar, “mmol” means millimole(s), “μmole” or “umole” mean micromole(s), “g” means gram(s), “μg” or “ug” means microgram(s), “ng” means nanogram(s), “U” means unit(s), “bp” means base pair(s) and “kb” means kilobase(s).

### NAC Transcription Factors

[0447] NAC (Petunia NAM, Arabidopsis ATAF1/2 and CUC2) proteins belong to a plant-specific transcription factor superfamily, whose members comprise a conserved sequence known as the DNA-binding NAC-domain in the N-terminal region and a variable transcriptional regulatory C-terminal region. Based on its motif distribution, the NAC-domain can be divided into five sub-domains (A-E) (Zhu et al Evolution 66-6: 1833-1848; Ooka et al. (2003) DNA Research 10,239-247). The C-terminal regions of some NAC TFs (transcription factors) also contain transmembrane motifs (TMs), which anchor to the plasma membrane. (Lu et al (2012) Plant Cell Rep 31:1701-1711; Tran et al. (2004) Plant Cell 16:2481-2498). At least 117 and 151 NAC family members have been predicted in Arabidopsis and rice, respectively (Nuruzzaman et al. (2010) Gene 465:30-44).

[0448] NAC proteins have been implicated in several important pathways, including senescence initiation, such as the Arabidopsis NAC transcription factor, AtNAP, and the GPC protein in wheat (Uauy et al (2006) Science, 24 November, vol 314; Thomas and Ougham Journal of Experimental Botany, Vol. 65, No. 14, pp. 3889-3900, 2014; Lee et al Plant J. (2012) 70, 831-844; Guo and Gan (2006) Plant J. 46,601-612.

[0449] Overexpression of some NAC family proteins, such as JUB1 in Arabidopsis thaliana has been shown to strongly delay senescence and enhance tolerance to various abiotic stresses (Wu et al (2012) Plant Cell, Vol. 24: 482-506. Overexpression of some NAC genes has been shown to significantly increase the drought and salt tolerance of a number of plants (Zheng et al. (2009) Biochem. Biophys. Res. Commun. 379:985-989; Lu et al (2012) Plant Cell Rep 31:1701-1711). Transgenic Arabidopsis plants overexpressing ZmSNAC1, a Zea mays NAC1 have been shown to exhibit enhanced sensitivity to ABA and osmotic stress in the germination stage, and exhibited increased tolerance to dehydration in the seedling stage. (Lu et al Plant Cell Rep (2012) 31:1701-1711).

[0450] NAC proteins have also been implicated in transcriptional control in a variety of plant processes, including in the development of the shoot apical meristem and floral organs, and in the formation of lateral roots. Arabidopsis NAC gene CUC3 has been reported to contribute to the establishment of the cotyledon boundary and the shoot meristem (Li et al. (2012) BMC Plant Biology, 12:220).

[0451] NAC proteins have also been implicated in responses to stress and viral infections (Ernst et al. (2004), EMBO Reports 5, 3, 297-303; Guo and Gan Plant Journal (2006) 46, 601-612, Yoon et al. Mol. Cells, Vol. 25, No. 3, pp. 438-445).

[0452] In some embodiments, a NAC protein includes a polypeptide selected from the group consisting of SEQID NOs: AAA-BBB. % ID, etc.

[0453] In some embodiments, a NAC protein is encoded by a polynucleotide selected from the group consisting of SEQID NOs: CCC-DDD. % ID, etc.

### Gene Editing

[0454] Methods to modify or alter endogenous genomic DNA are known in the art. In some aspects, methods and compositions are provided for modifying naturally-occurring polynucleotides or integrated transgenic sequences, including regulatory elements, coding sequences, and non-coding sequences. These methods and compositions are also useful in targeting nucleic acids to pre-engineered target recognition sequences in the genome. Modification of polynucleotides may be accomplished, for example, by introducing single- or double-strand breaks into the DNA molecule.

[0455] Double-strand breaks induced by double-strand-break-inducing agents, such as endonucleases that cleave the phosphodiester bond within a polynucleotide chain, can result in the induction of DNA repair mechanisms, including the non-homologous end-joining pathway, and homologous recombination. Endonucleases include a range of different enzymes, including restriction endonucleases (see e.g. Roberts et al., (2003) Nucleic Acids Res 1:418-20), Roberts et al., (2003) Nucleic Acids Res 31:1805-12, and Belfort et al., (2002) in Mobile DNA II, pp. 761-783, Eds. Craigie et al., (ASM Press, Washington, D.C.)), meganucleases (see e.g., WO 2009/114321; Gao et al. (2010) Plant Journal 1:176-187), TAL effector nucleases or TALENs (see e.g., US20110145940, Christian, M., T. Cermak, et al. 2010. Targeting DNA double-strand breaks with TAL effector nucleases. Genetics 186(2): 757-61 and Boch et al., (2009), Science 326(5959): 1509-12), zinc finger nucleases (see e.g. Kim, Y. G., J. Cha, et al. (1996). “Hybrid restriction enzymes: zinc finger fusions to FokI cleavage”), and CRISPR-Cas endonucleases (see e.g. WO2007/025097 application published Mar. 1, 2007).

[0456] Once a double-strand break is induced in the genome, cellular DNA repair mechanisms are activated to repair the break. There are two DNA repair pathways. One is termed nonhomologous end-joining (NHEJ) pathway (Bleuyard et al., (2006) DNA Repair 5:1-12) and the other is homology-directed repair (HDR). The structural integrity of chromosomes is typically preserved by NHEJ, but deletions, insertions, or other rearrangements (such as chromosomal translocations) are possible (Siebert and Puchta, 2002, Plant Cell 14:1121-31; Pacher et al., 2007, Genetics 175:21-9. The HDR pathway is another cellular mechanism to repair double-stranded DNA breaks, and includes homologous recombination (HR) and single-strand annealing (SSA) (Lieber. 2010 Annu. Rev. Biochem. 79:181-211).

[0457] In addition to the double-strand break inducing agents, site-specific base conversions can also be achieved to engineer one or more nucleotide changes to create one or more edits described herein into the genome. These include for example, a site-specific base edit mediated by a C⋅G to T⋅A or an A⋅T to G⋅C base editing deaminase enzymes (Gaudelli et al., Programmable base editing of A⋅T to G⋅C in genomic DNA without DNA cleavage.” Nature (2017); Nishida et al. “Targeted nucleotide editing using hybrid prokaryotic and vertebrate adaptive immune systems.” Science 353 (6305) (2016); Komor et al. “Programmable editing of a target base in genomic DNA without double-stranded DNA cleavage.” Nature 533 (7603) (2016):420-4. Catalytically dead dCas9 fused to a cytidine deaminase or an adenine deaminase protein becomes a specific base editor that can alter DNA bases without inducing a DNA break. Base editors convert C->T (or G->A on the opposite strand) or an adenine base editor that would convert adenine to inosine, resulting in an A->G change within an editing window specified by the gRNA.

### CRISPR-Cas Systems for Gene Editing

[0458] CRISPR (Clustered Regularly Interspaced Short Palindromic Repeats) loci refers to certain genetic loci encoding components of DNA cleavage systems, for example, used by bacterial and archaeal cells to destroy foreign DNA (Horvath and Barrangou, 2010, Science 327:167-170; WO2007025097, published 1 Mar. 2007). A CRISPR locus can consist of a CRISPR array, comprising short direct repeats (CRISPR repeats) separated by short variable DNA sequences (called spacers), which can be flanked by diverse Cas (CRISPR-associated) genes.

[0459] Endonucleases identified from CRISPR systems may be used to edit a particular polynucleotide, in vitro or in vivo, to effect changes such as nucleotide substitutions, deletions, insertions, or any combination thereof.

### Cas Endonucleases

[0460] As used herein, the term “Cas gene” refers to a gene that is generally coupled, associated or close to or in the vicinity of flanking CRISPR loci.

[0461] Cas endonucleases, either as single effector proteins or in an effector complex with other components, unwind the DNA duplex at the target sequence and optionally cleave at least one DNA strand, as mediated by recognition of the target sequence by a polynucleotide (such as, but not limited to, a crRNA or guide RNA) that is in complex with the Cas effector protein. Such recognition and cutting of a target sequence by a Cas endonuclease typically occurs if the correct protospacer-adjacent motif (PAM) is located at or adjacent to the 3′ end of the DNA target sequence.

[0462] Many Cas endonucleases have been described to date that can recognize specific PAM sequences (WO2016186953 published 24 Nov. 2016, WO2016186946 published 24 Nov. 2016, and Zetsche B et al. 2015. Cell 163, 1013) and cleave the target DNA at a specific position.

[0463] Alternatively, a Cas endonuclease herein may lack DNA cleavage or nicking activity, but can still specifically bind to a DNA target sequence when complexed with a suitable RNA component. (See also U.S. Patent Application US20150082478 published 19 Mar. 2015 and US20150059010 published 26 Feb. 2015).

[0464] Cas endonucleases may occur as individual effectors (Class 2 CRISPR systems) or as part of larger effector complexes (Class I CRISPR systems).

[0465] Cas endonucleases include, but are not limited to, Cas endonucleases identified from the following systems: Class 1, Class 2, Type I, Type II, Type III, Type IV, Type V, and Type VI. In some aspects, the Cas endonuclease is Cas3 (a feature of Class 1 type I systems), Cas9 (a feature of Class 2 type II systems) or Cas12 (Cpf1) (a feature of Class 2 type V systems).

[0466] Cas endonucleases and effector proteins can be used for targeted genome editing (via simplex and multiplex double-strand breaks and nicks) and targeted genome regulation (via tethering of epigenetic effector domains to either the Cas protein or sgRNA. A Cas endonuclease can also be engineered to function as an RNA-guided recombinase, and via RNA tethers could serve as a scaffold for the assembly of multiprotein and nucleic acid complexes (Mali et al., 2013, Nature Methods Vol. 10: 957-963).

[0467] A Cas endonuclease, effector protein, functional variant, or a functional fragment thereof, for use in the disclosed methods, can be isolated from a native source, or from a recombinant source where the genetically modified host cell is modified to express the nucleic acid sequence encoding the protein. Alternatively, the Cas protein can be produced using cell free protein expression systems, or be synthetically produced. Effector Cas nucleases may be isolated and introduced into a heterologous cell, or may be modified from its native form to exhibit a different type or magnitude of activity than what it would exhibit in its native source. Such modifications include but are not limited to: fragments, variants, substitutions, deletions, and insertions.

[0468] Fragments and variants of Cas endonucleases and Cas effector proteins can be obtained via methods such as site-directed mutagenesis and synthetic construction. Methods for measuring endonuclease activity are well known in the art such as, but not limiting to, WO2013166113 published 7 Nov. 2013, WO2016186953 published 24 Nov. 2016, and WO2016186946 published 24 Nov. 2016.

[0469] To facilitate optimal expression and nuclear localization for eukaryotic cells, the gene comprising the Cas endonuclease may be optimized as described in WO2016186953 published 24 Nov. 2016, and then delivered into cells as DNA expression cassettes by methods known in the art. In some aspects, the Cas endonuclease is provided as a polypeptide. In some aspects, the Cas endonuclease is provided as a polynucleotide encoding a polypeptide. In some aspects, the guide RNA is provided as a DNA molecule encoding one or more RNA molecules. In some aspects, the guide RNA is provide as RNA or chemically-modified RNA. In some aspects, the Cas endonuclease protein and guide RNA are provided as a ribonucleoprotein complex (RNP).

### Guide RNAs

[0470] The guide polynucleotide enables target recognition, binding, and optionally cleavage by the Cas endonuclease, and can be a single molecule or a double molecule. The guide polynucleotide sequence can be a RNA sequence, a DNA sequence, or a combination thereof (a RNA-DNA combination sequence). Optionally, the guide polynucleotide can comprise at least one nucleotide, phosphodiester bond or linkage modification such as, but not limited, to Locked Nucleic Acid (LNA), 5-methyl dC, 2,6-Diaminopurine, 2′-Fluoro A, 2′-Fluoro U, 2′-O-Methyl RNA, phosphorothioate bond, linkage to a cholesterol molecule, linkage to a polyethylene glycol molecule, linkage to a spacer 18 (hexaethylene glycol chain) molecule, or 5′ to 3′ covalent linkage resulting in circularization. A guide polynucleotide that solely comprises ribonucleic acids is also referred to as a “guide RNA” or “gRNA” (US20150082478 published 19 Mar. 2015 and US20150059010 published 26 Feb. 2015). A guide polynucleotide may be engineered or synthetic.

[0471] The guide polynucleotide includes a chimeric non-naturally occurring guide RNA comprising regions that are not found together in nature (i.e., they are heterologous with respect to each other). For example, a chimeric non-naturally occurring guide RNA comprising a first nucleotide sequence domain (referred to as Variable Targeting domain or VT domain) that can hybridize to a nucleotide sequence in a target DNA, linked to a second nucleotide sequence that can recognize the Cas endonuclease, such that the first and second nucleotide sequence are not found linked together in nature.

[0472] The guide polynucleotide can be a double molecule (also referred to as duplex guide polynucleotide) comprising a crNucleotide sequence and a tracrNucleotide sequence. The crNucleotide includes a first nucleotide sequence domain (referred to as Variable Targeting domain or VT domain) that can hybridize to a nucleotide sequence in a target DNA and a second nucleotide sequence (also referred to as a tracr mate sequence) that is part of a Cas endonuclease recognition (CER) domain. The tracr mate sequence can hybridized to a tracrNucleotide along a region of complementarity and together form the Cas endonuclease recognition domain or CER domain. The CER domain is capable of interacting with a Cas endonuclease polypeptide. The crNucleotide and the tracrNucleotide of the duplex guide polynucleotide can be RNA, DNA, and/or RNA-DNA-combination sequences.

[0473] The tracrRNA (trans-activating CRISPR RNA) comprises, in the 5′-to-3′ direction, (i) an “anti-repeat” sequence that anneals with the repeat region of CRISPR type II crRNA and (ii) a stem loop-comprising portion (Deltcheva et al., Nature 471:602-607). The duplex guide polynucleotide can form a complex with a Cas endonuclease, wherein said guide polynucleotide/Cas endonuclease complex (also referred to as a guide polynucleotide/Cas endonuclease system) can direct the Cas endonuclease to a genomic target site, enabling the Cas endonuclease to recognize, bind to, and optionally nick or cleave (introduce a single or double-strand break) into the target site. (US20150082478 published 19 Mar. 2015 and US20150059010 published 26 Feb. 2015). In some embodiments, the tracrNucleotide is referred to as “tracrRNA” (when composed of a contiguous stretch of RNA nucleotides) or “tracrDNA” (when composed of a contiguous stretch of DNA nucleotides) or “tracrDNA-RNA” (when composed of a combination of DNA and RNA nucleotides.

[0474] In one embodiment, the RNA that guides the RNA/Cas endonuclease complex is a duplexed RNA comprising a duplex crRNA-tracrRNA.

[0475] The guide RNA includes a dual molecule comprising a chimeric non-naturally occurring crRNA linked to at least one tracrRNA. A chimeric non-naturally occurring crRNA includes a crRNA that comprises regions that are not found together in nature (i.e., they are heterologous with each other. For example, a crRNA comprising a first nucleotide sequence domain (referred to as Variable Targeting domain or VT domain) that can hybridize to a nucleotide sequence in a target DNA, linked to a second nucleotide sequence (also referred to as a tracr mate sequence) such that the first and second sequence are not found linked together in nature.

[0476] The guide polynucleotide can also be a single molecule (also referred to as single guide polynucleotide) comprising a crNucleotide sequence linked to a tracrNucleotide sequence. The single guide polynucleotide comprises a first nucleotide sequence domain (referred to as Variable Targeting domain or VT domain) that can hybridize to a nucleotide sequence in a target DNA and a Cas endonuclease recognition domain (CER domain), that interacts with a Cas endonuclease polypeptide.

[0477] A chimeric non-naturally occurring single guide RNA (sgRNA) includes a sgRNA that comprises regions that are not found together in nature (i.e., they are heterologous with each other. For example, a sgRNA comprising a first nucleotide sequence domain (referred to as Variable Targeting domain or VT domain) that can hybridize to a nucleotide sequence in a target DNA linked to a second nucleotide sequence (also referred to as a tracr mate sequence) that are not found linked together in nature.

[0478] The guide polynucleotide can be produced by any method known in the art, including chemically synthesizing guide polynucleotides (such as but not limiting to Hendel et al. 2015, Nature Biotechnology 33, 985-989), in vitro generated guide polynucleotides, and/or self-splicing guide RNAs (such as but not limited to Xie et al. 2015, PNAS 112:3570-3575).

[0479] In one aspect, the functional variant of the guide RNA can form a guide RNA/Cas9 endonuclease complex that can recognize, bind to, and optionally nick or cleave a target sequence.

[0480] Cas endonucleases may be capable of forming a complex with a guide polynucleotide (e.g., guide RNA or gRNA) that is capable of recognizing, binding to, and optionally nicking, unwinding, or cleaving all or part of a target sequence. In some aspects, the guide polynucleotide/Cas endonuclease complex is capable of introducing a double-strand-break into a target polynucleotide. In some aspects, the guide polynucleotide comprises solely RNA, solely DNA, a chimeric molecule comprising both DNA and RNA, and/or comprises a chemically modified nucleotide. The guide polynucleotide (e.g., guide RNA) may be a single guide RNA (sgRNA) that is capable of binding to a sequence on the target polynucleotide.

[0481] Some uses for guide RNA/Cas endonuclease systems have been described (see for example: US20150082478 A1 published 19 Mar. 2015, WO2015026886 published 26 Feb. 2015, and US20150059010 published 26 Feb. 2015) and include but are not limited to modifying or replacing nucleotide sequences of interest (such as a regulatory elements), insertion of polynucleotides of interest, gene knock-out, gene-knock in, modification of splicing sites and/or introducing alternate splicing sites, modifications of nucleotide sequences encoding a protein of interest, amino acid and/or protein fusions, and gene silencing by expressing an inverted repeat into a gene of interest.

### Protospacer Adjacent Motif (PAM)

[0482] A “protospacer adjacent motif” (PAM) herein refers to a short nucleotide sequence adjacent to a target sequence (protospacer) that can be recognized (targeted) by a guide polynucleotide/Cas endonuclease system. In some aspects, the Cas endonuclease may not successfully recognize a target DNA sequence if the target DNA sequence is not adjacent to, or near, a PAM sequence. In some aspects, the PAM precedes the target sequence (e.g. Cas12a). In some aspects, the PAM follows the target sequence (e.g. S. pyogenes Cas9). The sequence and length of a PAM herein can differ depending on the Cas protein or Cas protein complex used. The PAM sequence can be of any length but is typically 1, 2, 3, 4, 5, 6, 7, 8, 9, 10, 11, 12, 13, 14, 15, 16, 17, 18, 19 or 20 nucleotides long.

[0483] Many Cas endonucleases have been described to date that can recognize specific PAM sequences (WO2016186953 published 24 Nov. 2016, WO2016186946 published 24 Nov. 2016, and Zetsche B et al. 2015. Cell 163, 1013) and cleave the target DNA at a specific position. It is understood that based on the methods and embodiments described herein utilizing a novel guided Cas system one skilled in the art can now tailor these methods such that they can utilize any guided endonuclease system.

### Cas9-gRNA Mediated Gene Editing

[0484] The process for editing a genomic sequence at a Cas9-gRNA double-strand-break site with a modification template generally comprises: providing a host cell with a Cas9-gRNA complex that recognizes a target sequence in the genome of the host cell and is able to induce a double-strand-break in the genomic sequence, and at least one polynucleotide modification template comprising at least one nucleotide alteration when compared to the nucleotide sequence to be edited. The polynucleotide modification template can further comprise nucleotide sequences flanking the at least one nucleotide alteration, in which the flanking sequences are substantially homologous to the chromosomal region flanking the double-strand break. Genome editing using double-strand-break-inducing agents, such as Cas9-gRNA complexes, has been described, for example in US20150082478 published on 19 Mar. 2015, WO2015026886 published on 26 Feb. 2015, WO2016007347 published 14 Jan. 2016, and WO2016025131 published on 18 Feb. 2016.

[0485] A guide polynucleotide/Cas endonuclease complex described herein is capable of recognizing, binding to, and optionally nicking, unwinding, or cleaving all or part of a target sequence.

[0486] Some uses for guide RNA/Cas9 endonuclease systems include but are not limited to modifying or replacing nucleotide sequences of interest (such as a regulatory elements), insertion of polynucleotides of interest, gene knock-out, gene-knock in, gene knock-down, modification of splicing sites and/or introducing alternate splicing sites, modifications of nucleotide sequences encoding a protein of interest, amino acid and/or protein fusions, and gene silencing by expressing an inverted repeat into a gene of interest.

### Transformation of Cells and Organisms

[0487] The disclosed guide polynucleotides, Cas endonucleases, polynucleotide modification templates, donor DNAs, guide polynucleotide/Cas endonuclease systems disclosed herein, and any one combination thereof, optionally further comprising one or more polynucleotide(s) of interest, can be introduced into a cell. Cells include, but are not limited to, human, non-human, animal, bacterial, fungal, insect, yeast, non-conventional yeast, and plant cells as well as plants and seeds produced by the methods described herein.

[0488] Standard recombinant DNA and molecular cloning techniques used herein are well known in the art and are described more fully in Sambrook et al., Molecular Cloning: A Laboratory Manual; Cold Spring Harbor Laboratory: Cold Spring Harbor, N.Y. (1989). Transformation methods are well known to those skilled in the art and are described infra.

[0489] Vectors and constructs include circular plasmids, and linear polynucleotides, comprising a polynucleotide of interest and optionally other components including linkers, adapters, regulatory or analysis. In some examples a recognition site and/or target site can be comprised within an intron, coding sequence, 5′ UTRs, 3′ UTRs, and/or regulatory regions.

Transformation with a Recombinant Construct

[0490] The invention further provides expression constructs for expressing in a prokaryotic or eukaryotic cell/organism a guide RNA/Cas system that is capable of recognizing, binding to, and optionally nicking, unwinding, or cleaving all or part of a target sequence.

[0491] In one embodiment, the expression constructs of the disclosure comprise a promoter operably linked to a nucleotide sequence encoding a Cas gene (or plant optimized, including a Cas endonuclease gene described herein) and a promoter operably linked to a guide RNA of the present disclosure. The promoter is capable of driving expression of an operably linked nucleotide sequence in a prokaryotic or eukaryotic cell/organism.

[0492] Nucleotide sequence modification of the guide polynucleotide, VT domain and/or CER domain can be selected from, but not limited to, the group consisting of a 5′ cap, a 3′ polyadenylated tail, a riboswitch sequence, a stability control sequence, a sequence that forms a dsRNA duplex, a modification or sequence that targets the guide poly nucleotide to a subcellular location, a modification or sequence that provides for tracking, a modification or sequence that provides a binding site for proteins, a Locked Nucleic Acid (LNA), a 5-methyl dC nucleotide, a 2,6-Diaminopurine nucleotide, a 2′-Fluoro A nucleotide, a 2′-Fluoro U nucleotide; a 2′-O-Methyl RNA nucleotide, a phosphorothioate bond, linkage to a cholesterol molecule, linkage to a polyethylene glycol molecule, linkage to a spacer 18 molecule, a 5′ to 3′ covalent linkage, or any combination thereof. These modifications can result in at least one additional beneficial feature, wherein the additional beneficial feature is selected from the group of a modified or regulated stability, a subcellular targeting, tracking, a fluorescent label, a binding site for a protein or protein complex, modified binding affinity to complementary target sequence, modified resistance to cellular degradation, and increased cellular permeability.

[0493] A method of expressing RNA components such as gRNA in eukaryotic cells for performing Cas9-mediated DNA targeting has been to use RNA polymerase III (Pol III) promoters, which allow for transcription of RNA with precisely defined, unmodified, 5′- and 3′-ends (DiCarlo et al., Nucleic Acids Res. 41: 4336-4343; Ma et al., Mol. Ther. Nucleic Acids 3:e161). This strategy has been successfully applied in cells of several different species including maize and soybean (US20150082478 published 19 Mar. 2015). Methods for expressing RNA components that do not have a 5′ cap have been described (WO2016/025131 published 18 Feb. 2016).

[0494] Various methods and compositions can be employed to obtain a cell or organism having a polynucleotide of interest inserted in a target site for a Cas endonuclease. Such methods can employ homologous recombination (HR) to provide integration of the polynucleotide of interest at the target site. In one method described herein, a polynucleotide of interest is introduced into the organism cell via a donor DNA construct.

[0495] The donor DNA construct further comprises a first and a second region of homology that flank the polynucleotide of interest. The first and second regions of homology of the donor DNA share homology to a first and a second genomic region, respectively, present in or flanking the target site of the cell or organism genome.

[0496] The donor DNA can be tethered to the guide polynucleotide. Tethered donor DNAs can allow for co-localizing target and donor DNA, useful in genome editing, gene insertion, and targeted genome regulation, and can also be useful in targeting post-mitotic cells where function of endogenous HR machinery is expected to be highly diminished (Mali et al., 2013, Nature Methods Vol. 10: 957-963).

[0497] The amount of homology or sequence identity shared by a target and a donor polynucleotide can vary and includes total lengths and/or regions having unit integral values in the ranges of about 1-20 bp, 20-50 bp, 50-100 bp, 75-150 bp, 100-250 bp, 150-300 bp, 200-400 bp, 250-500 bp, 300-600 bp, 350-750 bp, 400-800 bp, 450-900 bp, 500-1000 bp, 600-1250 bp, 700-1500 bp, 800-1750 bp, 900-2000 bp, 1-2.5 kb, 1.5-3 kb, 2-4 kb, 2.5-5 kb, 3-6 kb, 3.5-7 kb, 4-8 kb, 5-10 kb, or up to and including the total length of the target site. These ranges include every integer within the range, for example, the range of 1-20 bp includes 1, 2, 3, 4, 5, 6, 7, 8, 9, 10, 11, 12, 13, 14, 15, 16, 17, 18, 19 and 20 bps. The amount of homology can also be described by percent sequence identity over the full aligned length of the two polynucleotides which includes percent sequence identity of about at least 50%, 55%, 60%, 65%, 70%, 71%, 72%, 73%, 74%, 75%, 76%, 77%, 78%, 79%, 80%, 81%, 82%, 83%, 84%, 85%, 86%, 87%, 88%, 89%, 90%, 91%, 92%, 93%, 94%, 95%, 96%, 97%, 98%, between 98% and 99%, 99%, between 99% and 100%, or 100%. Sufficient homology includes any combination of polynucleotide length, global percent sequence identity, and optionally conserved regions of contiguous nucleotides or local percent sequence identity, for example sufficient homology can be described as a region of 75-150 bp having at least 80% sequence identity to a region of the target locus. Sufficient homology can also be described by the predicted ability of two polynucleotides to specifically hybridize under high stringency conditions, see, for example, Sambrook et al., (1989) Molecular Cloning: A Laboratory Manual, (Cold Spring Harbor Laboratory Press, NY); Current Protocols in Molecular Biology, Ausubel et al., Eds (1994) Current Protocols, (Greene Publishing Associates, Inc. and John Wiley & Sons, Inc.); and, Tijssen (1993) Laboratory Techniques in Biochemistry and Molecular Biology—Hybridization with Nucleic Acid Probes, (Elsevier, New York).

[0498] The structural similarity between a given genomic region and the corresponding region of homology found on the donor DNA can be any degree of sequence identity that allows for homologous recombination to occur. For example, the amount of homology or sequence identity shared by the “region of homology” of the donor DNA and the “genomic region” of the organism genome can be at least 50%, 55%, 60%, 65%, 70%, 75%, 80%, 81%, 82%, 83%, 84%, 85%, 86%, 87%, 88%, 89%, 90%, 91%, 92%, 93%, 94%, 95%, 96%, 97%, 98%, 99% or 100% sequence identity, such that the sequences undergo homologous recombination

[0499] The region of homology on the donor DNA can have homology to any sequence flanking the target site. While in some instances the regions of homology share significant sequence homology to the genomic sequence immediately flanking the target site, it is recognized that the regions of homology can be designed to have sufficient homology to regions that may be further 5′ or 3′ to the target site. The regions of homology can also have homology with a fragment of the target site along with downstream genomic regions

[0500] In one embodiment, the first region of homology further comprises a first fragment of the target site and the second region of homology comprises a second fragment of the target site, wherein the first and second fragments are dissimilar.

[0501] Methods are available in the art for synthesizing plant-preferred genes. See, for example, U.S. Pat. Nos. 5,380,831, and 5,436,391, and Murray et al. (1989) Nucleic Acids Res. 17:477-498. Additional sequence modifications are known to enhance gene expression in a plant host. These include, for example, elimination of: one or more sequences encoding spurious polyadenylation signals, one or more exon-intron splice site signals, one or more transposon-like repeats, and other such well-characterized sequences that may be deleterious to gene expression. The G-C content of the sequence may be adjusted to levels average for a given plant host, as calculated by reference to known genes expressed in the host plant cell. When possible, the sequence is modified to avoid one or more predicted hairpin secondary mRNA structures. Thus, “a plant-optimized nucleotide sequence” of the present disclosure comprises one or more of such sequence modifications.

[0502] Any polynucleotide encoding a Cas protein or other CRISPR system component disclosed herein may be functionally linked to a heterologous expression element, to facilitate transcription or regulation in a host cell. Such expression elements include but are not limited to: promoter, leader, intron, and terminator. Expression elements may be “minimal”—meaning a shorter sequence derived from a native source, that still functions as an expression regulator or modifier. Alternatively, an expression element may be “optimized”—meaning that its polynucleotide sequence has been altered from its native state in order to function with a more desirable characteristic in a particular host cell (for example, but not limited to, a bacterial promoter may be “maize-optimized” to improve its expression in corn plants). Alternatively, an expression element may be “synthetic”—meaning that it is designed in silico and synthesized for use in a host cell. Synthetic expression elements may be entirely synthetic, or partially synthetic (comprising a fragment of a naturally-occurring polynucleotide sequence).

[0503] It has been shown that certain promoters are able to direct RNA synthesis at a higher rate than others. These are called “strong promoters”. Certain other promoters have been shown to direct RNA synthesis at higher levels only in particular types of cells or tissues and are often referred to as “tissue specific promoters”, or “tissue-preferred promoters” if the promoters direct RNA synthesis preferably in certain tissues but also in other tissues at reduced levels.

[0504] A plant promoter includes a promoter capable of initiating transcription in a plant cell. For a review of plant promoters, see, Potenza et al., 2004, In vitro Cell Dev Biol 40:1-22; Porto et al., 2014, Molecular Biotechnology (2014), 56(1), 38-49.

### Introduction of a Cas Endonuclease Protein and a Guide RNA Polyribonucleotide

[0505] In some aspects, the Cas endonuclease and guide RNA may be introduced into the cell as a protein and a ribonuclease individually, or together as a ribonucleoprotein complex.

[0506] Following characterization of the guide RNA (or guide polynucleotide) and PAM sequence, a ribonucleoprotein (RNP) complex comprising the Cas endonuclease and the guide RNA (or guide polynucleotide) may be utilized to modify a target polynucleotide, including but not limited to: synthetic DNA, isolated genomic DNA, or chromosomal DNA in other organisms, including plants. To facilitate optimal expression and nuclear localization (for eukaryotic cells), the gene comprising the Cas endonculease may be optimized as described in WO2016186953 published 24 Nov. 2016, and then delivered into cells as DNA expression cassettes by methods known in the art. The components necessary to comprise an active RNP may also be delivered as RNA with or without modifications that protect the RNA from degradation or as mRNA capped or uncapped (Zhang, Y. et al., 2016, Nat. Commun. 7:12617) or Cas protein guide polynucleotide complexes (WO2017070032 published 27 Apr. 2017), or any combination thereof. Additionally, a part or part(s) of the complex may be expressed from a DNA construct while other components are delivered as RNA with or without modifications that protect the RNA from degradation or as mRNA capped or uncapped (Zhang et al. 2016 Nat. Commun. 7:12617) or Cas protein guide polynucleotide complexes (WO2017070032 published 27 Apr. 2017) or any combination thereof.

### Modification of Cells

[0507] As described herein, a guided Cas endonuclease can recognize, bind to a DNA target sequence and introduce a single strand (nick) or double-strand break. Once a single or double-strand break is induced in the DNA, the cell's DNA repair mechanism is activated to repair the break. Error-prone DNA repair mechanisms can produce mutations at double-strand break sites. The most common repair mechanism to bring the broken ends together is the nonhomologous end-joining (NHEJ) pathway (Bleuyard et al., (2006) DNA Repair 5:1-12). The structural integrity of chromosomes is typically preserved by the repair, but deletions, insertions, or other rearrangements (such as chromosomal translocations) are possible (Siebert and Puchta, 2002, Plant Cell 14:1121-31; Pacher et al., 2007, Genetics 175:21-9).

[0508] Alteration of the genome of a prokaryotic and eukaryotic cell or organism cell, for example, through homologous recombination (HR), is a powerful tool for genetic engineering. Homologous recombination has been demonstrated in plants (Halfter et al., (1992) Mol Gen Genet 231:186-93) and insects (Dray and Gloor, 1997, Genetics 147:689-99).

[0509] The methods and compositions described herein do not depend on a particular method for introducing a sequence into an organism or cell, only that the polynucleotide or polypeptide gains access to the interior of at least one cell of the organism. Introducing includes reference to the incorporation of a nucleic acid into a eukaryotic or prokaryotic cell where the nucleic acid may be incorporated into the genome of the cell, and includes reference to the transient (direct) provision of a nucleic acid, protein or polynucleotide-protein complex

[0510] Methods for introducing polynucleotides or polypeptides or a polynucleotide-protein complex into cells or organisms are known in the art including, but not limited to, microinjection, electroporation, stable transformation methods, transient transformation methods, ballistic particle acceleration (particle bombardment), whiskers mediated transformation, Agrobacterium-mediated transformation, direct gene transfer, viral-mediated introduction, transfection, transduction, cell-penetrating peptides, mesoporous silica nanoparticle (MSN)-mediated direct protein delivery, topical applications, sexual crossing, sexual breeding, and any combination thereof. Protocols for introducing polynucleotides, polypeptides or polynucleotide-protein complexes into eukaryotic cells, such as plants or plant cells are known and include microinjection (Crossway et al., (1986) Biotechniques 4:320-34 and U.S. Pat. No. 6,300,543), meristem transformation (U.S. Pat. No. 5,736,369), electroporation (Riggs et al., (1986) Proc. Natl. Acad. Sci. USA 83:5602-6, Agrobacterium-mediated transformation (U.S. Pat. Nos. 5,563,055 and 5,981,840), whiskers mediated transformation (Ainley et al. 2013, Plant Biotechnology Journal 11:1126-1134; Shaheen A. and M. Arshad 2011 Properties and Applications of Silicon Carbide (2011), 345-358 Editor(s): Gerhardt, Rosario. Publisher: InTech, Rijeka, Croatia. CODEN: 69PQBP; ISBN: 978-953-307-201-2), direct gene transfer (Paszkowski et al., (1984) EMBO J 3:2717-22), and ballistic particle acceleration (U.S. Pat. Nos. 4,945,050; 5,879,918; 5,886,244; 5,932,782; Tomes et al., (1995) “Direct DNA Transfer into Intact Plant Cells via Microprojectile Bombardment” in Plant Cell, Tissue, and Organ Culture: Fundamental Methods, ed. Gamborg & Phillips (Springer-Verlag, Berlin); McCabe et al., (1988) Biotechnology 6:923-6; Weissinger et al., (1988) Ann Rev Genet 22:421-77; Sanford et al., (1987) Particulate Science and Technology 5:27-37 (onion); Christou et al., (1988) Plant Physiol 87:671-4 (soybean); Finer and McMullen, (1991) In vitro Cell Dev Biol 27P:175-82 (soybean); Singh et al., (1998) Theor Appl Genet 96:319-24 (soybean); Datta et al., (1990) Biotechnology 8:736-40 (rice); Klein et al., (1988) Proc. Natl. Acad. Sci. USA 85:4305-9 (maize); Klein et al., (1988) Biotechnology 6:559-63 (maize); U.S. Pat. Nos. 5,240,855; 5,322,783 and 5,324,646; Klein et al., (1988) Plant Physiol 91:440-4 (maize); Fromm et al., (1990) Biotechnology 8:833-9 (maize); Hooykaas-Van Slogteren et al., (1984) Nature 311:763-4; U.S. Pat. No. 5,736,369 (cereals); Bytebier et al., (1987) Proc. Natl. Acad. Sci. USA 84:5345-9 (Liliaceae); De Wet et al., (1985) in The Experimental Manipulation of Ovule Tissues, ed. Chapman et al., (Longman, New York), pp. 197-209 (pollen); Kaeppler et al., (1990) Plant Cell Rep 9:415-8) and Kaeppler et al., (1992) Theor Appl Genet 84:560-6 (whisker-mediated transformation); D'Halluin et al., (1992) Plant Cell 4:1495-505 (electroporation); Li et al., (1993) Plant Cell Rep 12:250-5; Christou and Ford (1995) Annals Botany 75:407-13 (rice) and Osjoda et al., (1996) Nat Biotechnol 14:745-50 (maize via Agrobacterium tumefaciens).

[0511] Alternatively, polynucleotides may be introduced into plant or plant cells by contacting cells or organisms with a virus or viral nucleic acids. Generally, such methods involve incorporating a polynucleotide within a viral DNA or RNA molecule. In some examples a polypeptide of interest may be initially synthesized as part of a viral polyprotein, which is later processed by proteolysis in vivo or in vitro to produce the desired recombinant protein. Methods for introducing polynucleotides into plants and expressing a protein encoded therein, involving viral DNA or RNA molecules, are known, see, for example, U.S. Pat. Nos. 5,889,191, 5,889,190, 5,866,785, 5,589,367 and 5,316,931.

[0512] In one aspect, the guide polynucleotide and/or Cas endonuclease are provided to the cell or target organism as a polynucleotide on a recombinant vector.

[0513] In one aspect, the guide polynucleotide/Cas endonuclease complex is a complex wherein the guide RNA and Cas endonuclease protein forming the guide RNA/Cas endonuclease complex are introduced into the cell as RNA and protein, respectively.

[0514] In one aspect, the guide polynucleotide/Cas endonuclease complex is a complex wherein the guide RNA and Cas endonuclease protein and the at least one protein subunit of a Cas protein forming the guide RNA/Cas endonuclease complex are introduced into the cell as RNA and proteins, respectively.

[0515] In one aspect, the guide polynucleotide/Cas endonuclease complex is a complex wherein the guide RNA and Cas endonuclease protein and the at least one protein subunit of a Cascade forming the guide RNA/Cas endonuclease complex (cleavage ready cascade) are preassembled in vitro and introduced into the cell as a ribonucleotide-protein complex.

[0516] Stable transformation is intended to mean that the nucleotide construct introduced into an organism integrates into a genome of the organism and is capable of being inherited by the progeny thereof. Transient transformation is intended to mean that a polynucleotide is introduced into the organism and does not integrate into a genome of the organism or a polypeptide is introduced into an organism. Transient transformation indicates that the introduced composition is only temporarily expressed or present in the organism.

[0517] A variety of methods are available to identify those cells having an altered genome at or near a target site without using a screenable marker phenotype. Such methods can be viewed as directly analyzing a target sequence to detect any change in the target sequence, including but not limited to PCR methods, sequencing methods, nuclease digestion, Southern blots, and any combination thereof.

### Gene Targeting

[0518] The guide polynucleotide/Cas systems described herein can be used for gene targeting.

[0519] In general, DNA targeting can be performed by cleaving one or both strands at a specific polynucleotide sequence in a cell with a Cas protein associated with a suitable polynucleotide component. Once a single or double-strand break is induced in the DNA, the cell's DNA repair mechanism is activated to repair the break via nonhomologous end-joining (NHEJ) or Homology-Directed Repair (HDR) processes which can lead to modifications at the target site.

[0520] The length of the DNA sequence at the target site can vary, and includes, for example, target sites that are at least 12, 13, 14, 15, 16, 17, 18, 19, 20, 21, 22, 23, 24, 25, 26, 27, 28, 29, 30, or more than 30 nucleotides in length. It is further possible that the target site can be palindromic, that is, the sequence on one strand reads the same in the opposite direction on the complementary strand. The nick/cleavage site can be within the target sequence or the nick/cleavage site could be outside of the target sequence. In another variation, the cleavage could occur at nucleotide positions immediately opposite each other to produce a blunt end cut or, in other cases, the incisions could be staggered to produce single-stranded overhangs, also called “sticky ends” or “staggered end”, which can be either 5′ overhangs, or 3′ overhangs. Active variants of genomic target sites can also be used. Such active variants can comprise at least 65%, 70%, 75%, 80%, 85%, 90%, 91%, 92%, 93%, 94%, 95%, 96%, 97%, 98%, 99% or more sequence identity to the given target site, wherein the active variants retain biological activity and hence are capable of being recognized and cleaved by a Cas endonuclease.

[0521] Assays to measure the single or double-strand break of a target site by an endonuclease are known in the art and generally measure the overall activity and specificity of the agent on DNA substrates comprising recognition sites.

[0522] A targeting method herein can be performed in such a way that two or more DNA target sites are targeted in the method, for example. Such a method can optionally be characterized as a multiplex method. Two, three, four, five, six, seven, eight, nine, ten, or more target sites can be targeted at the same time in certain embodiments. A multiplex method is typically performed by a targeting method herein in which multiple different RNA components are provided, each designed to guide a guide polynucleotide/Cas endonuclease complex to a unique DNA target site.

### Gene Editing

[0523] In one embodiment, the invention describes a method for modifying a target site in the genome of a cell, the method comprising introducing into a cell at least one Cas endonuclease and one guide RNA, and identifying at least one cell that has a modification at said target, wherein the modification at said target site is selected from the group consisting of insertion of at least one nucleotide, deletion of at least one nucleotide, replacement or substitution of at least one nucleotide, chemical modification of at least one nucleotide, or any combination of the preceding.

[0524] The nucleotide to be edited can be located within or outside a target site recognized and cleaved by a Cas endonuclease. In one embodiment, the at least one nucleotide modification is not a modification at a target site recognized and cleaved by a Cas endonuclease. In another embodiment, there are at least 1, 2, 3, 4, 5, 6, 7, 8, 9, 10, 11, 12, 13, 14, 15, 16, 17, 18, 19, 20, 21, 22, 23, 24, 25, 26, 27, 30, 40, 50, 100, 200, 300, 400, 500, 600, 700, 900 or 1000 nucleotides between the at least one nucleotide to be edited and the genomic target site.

[0525] A knock-out may be produced by an indel (insertion or deletion of nucleotide bases in a target DNA sequence through NHEJ), or by specific removal of sequence that reduces or completely destroys the function of sequence at or near the targeting site.

[0526] A guide polynucleotide/Cas endonuclease induced targeted mutation can occur in a nucleotide sequence that is located within or outside a genomic target site that is recognized and cleaved by the Cas endonuclease.

[0527] The method for editing a nucleotide sequence in the genome of a cell can be a method without the use of an exogenous selectable marker by restoring function to a non-functional gene product.

[0528] In one embodiment, the invention describes a method for modifying a target site in the genome of a cell, the method comprising introducing into a cell at least one PGEN described herein and at least one donor DNA, wherein said donor DNA comprises a polynucleotide of interest, and optionally, further comprising identifying at least one cell that said polynucleotide of interest integrated in or near said target site.

[0529] In one aspect, the methods disclosed herein may employ homologous recombination (HR) to provide integration of the polynucleotide of interest at the target site.

[0530] Various methods and compositions can be employed to produce a cell or organism having a polynucleotide of interest inserted in a target site via activity of a CRISPR-Cas system component described herein. In one method described herein, a polynucleotide of interest is introduced into the organism cell via a donor DNA construct. As used herein, “donor DNA” is a DNA construct that comprises a polynucleotide of interest to be inserted into the target site of a Cas endonuclease. The donor DNA construct further comprises a first and a second region of homology that flank the polynucleotide of interest. The first and second regions of homology of the donor DNA share homology to a first and a second genomic region, respectively, present in or flanking the target site of the cell or organism genome.

[0531] The donor DNA can be tethered to the guide polynucleotide. Tethered donor DNAs can allow for co-localizing target and donor DNA, useful in genome editing, gene insertion, and targeted genome regulation, and can also be useful in targeting post-mitotic cells where function of endogenous HR machinery is expected to be highly diminished (Mali et al., 2013, Nature Methods Vol. 10: 957-963).

[0532] The amount of homology or sequence identity shared by a target and a donor polynucleotide can vary and includes total lengths and/or regions having unit integral values in the ranges of about 1-20 bp, 20-50 bp, 50-100 bp, 75-150 bp, 100-250 bp, 150-300 bp, 200-400 bp, 250-500 bp, 300-600 bp, 350-750 bp, 400-800 bp, 450-900 bp, 500-1000 bp, 600-1250 bp, 700-1500 bp, 800-1750 bp, 900-2000 bp, 1-2.5 kb, 1.5-3 kb, 2-4 kb, 2.5-5 kb, 3-6 kb, 3.5-7 kb, 4-8 kb, 5-10 kb, or up to and including the total length of the target site. These ranges include every integer within the range, for example, the range of 1-20 bp includes 1, 2, 3, 4, 5, 6, 7, 8, 9, 10, 11, 12, 13, 14, 15, 16, 17, 18, 19 and 20 bps. The amount of homology can also be described by percent sequence identity over the full aligned length of the two polynucleotides which includes percent sequence identity of about at least 50%, 55%, 60%, 65%, 70%, 71%, 72%, 73%, 74%, 75%, 76%, 77%, 78%, 79%, 80%, 81%, 82%, 83%, 84%, 85%, 86%, 87%, 88%, 89%, 90%, 91%, 92%, 93%, 94%, 95%, 96%, 97%, 98%, 99% or 100%. Sufficient homology includes any combination of polynucleotide length, global percent sequence identity, and optionally conserved regions of contiguous nucleotides or local percent sequence identity, for example sufficient homology can be described as a region of 75-150 bp having at least 80% sequence identity to a region of the target locus. Sufficient homology can also be described by the predicted ability of two polynucleotides to specifically hybridize under high stringency conditions, see, for example, Sambrook et al., (1989) Molecular Cloning: A Laboratory Manual, (Cold Spring Harbor Laboratory Press, NY); Current Protocols in Molecular Biology, Ausubel et al., Eds (1994) Current Protocols, (Greene Publishing Associates, Inc. and John Wiley & Sons, Inc.); and, Tijssen (1993) Laboratory Techniques in Biochemistry and Molecular Biology—Hybridization with Nucleic Acid Probes, (Elsevier, New York).

[0533] Episomal DNA molecules can also be ligated into the double-strand break, for example, integration of T-DNAs into chromosomal double-strand breaks (Chilton and Que, (2003) Plant Physiol 133:956-65; Salomon and Puchta, (1998) EMBO J. 17:6086-95). Once the sequence around the double-strand breaks is altered, for example, by exonuclease activities involved in the maturation of double-strand breaks, gene conversion pathways can restore the original structure if a homologous sequence is available, such as a homologous chromosome in non-dividing somatic cells, or a sister chromatid after DNA replication (Molinier et al., (2004) Plant Cell 16:342-52). Ectopic and/or epigenic DNA sequences may also serve as a DNA repair template for homologous recombination (Puchta, (1999) Genetics 152:1173-81).

[0534] In one embodiment, the disclosure comprises a method for editing a nucleotide sequence in the genome of a cell, the method comprising introducing into at least one PGEN described herein, and a polynucleotide modification template, wherein said polynucleotide modification template comprises at least one nucleotide modification of said nucleotide sequence, and optionally further comprising selecting at least one cell that comprises the edited nucleotide sequence.

[0535] The guide polynucleotide/Cas endonuclease system can be used in combination with at least one polynucleotide modification template to allow for editing (modification) of a genomic nucleotide sequence of interest. (See also US20150082478, published 19 Mar. 2015 and WO2015026886 published 26 Feb. 2015).

[0536] Polynucleotides of interest and/or traits can be stacked together in a complex trait locus as described in WO2012129373 published 27 Sep. 2012, and in WO2013112686, published 1 Aug. 2013. The guide polynucleotide/Cas endonuclease system described herein provides for an efficient system to generate double-strand breaks and allows for traits to be stacked in a complex trait locus.

[0537] A guide polynucleotide/Cas system as described herein, mediating gene targeting, can be used in methods for directing heterologous gene insertion and/or for producing complex trait loci comprising multiple heterologous genes in a fashion similar as disclosed in WO2012129373 published 27 Sep. 2012, where instead of using a double-strand break inducing agent to introduce a gene of interest, a guide polynucleotide/Cas system as disclosed herein is used. By inserting independent transgenes within 0.1, 0.2, 0.3, 0.4, 0.5, 1.0, 2, or even 5 centimorgans (cM) from each other, the transgenes can be bred as a single genetic locus (see, for example, US20130263324 published 3 Oct. 2013 or WO2012129373 published 14 Mar. 2013). After selecting a plant comprising a transgene, plants comprising (at least) one transgenes can be crossed to form an F1 that comprises both transgenes. In progeny from these F1 (F2 or BC1) 1/500 progeny would have the two different transgenes recombined onto the same chromosome. The complex locus can then be bred as single genetic locus with both transgene traits. This process can be repeated to stack as many traits as desired.

[0538] Further uses for guide RNA/Cas endonuclease systems have been described (See for example: US20150082478 published 19 Mar. 2015, WO2015026886 published 26 Feb. 2015, US20150059010 published 26 Feb. 2015, WO2016007347 published 14 Jan. 2016, and PCT application WO2016025131 published 18 Feb. 2016) and include but are not limited to modifying or replacing nucleotide sequences of interest (such as a regulatory elements), insertion of polynucleotides of interest, gene knock-out, gene-knock in, modification of splicing sites and/or introducing alternate splicing sites, modifications of nucleotide sequences encoding a protein of interest, amino acid and/or protein fusions, and gene silencing by expressing an inverted repeat into a gene of interest.

[0539] Resulting characteristics from the gene editing compositions and methods described herein may be evaluated. Chromosomal intervals that correlate with a phenotype or trait of interest can be identified. A variety of methods well known in the art are available for identifying chromosomal intervals. The boundaries of such chromosomal intervals are drawn to encompass markers that will be linked to the gene controlling the trait of interest. In other words, the chromosomal interval is drawn such that any marker that lies within that interval (including the terminal markers that define the boundaries of the interval) can be used as a marker for a particular trait. In one embodiment, the chromosomal interval comprises at least one QTL, and furthermore, may indeed comprise more than one QTL. Close proximity of multiple QTLs in the same interval may obfuscate the correlation of a particular marker with a particular QTL, as one marker may demonstrate linkage to more than one QTL. Conversely, e.g., if two markers in close proximity show co-segregation with the desired phenotypic trait, it is sometimes unclear if each of those markers identifies the same QTL or two different QTL. The term “quantitative trait locus” or “QTL” refers to a region of DNA that is associated with the differential expression of a quantitative phenotypic trait in at least one genetic background, e.g., in at least one breeding population. The region of the QTL encompasses or is closely linked to the gene or genes that affect the trait in question. An “allele of a QTL” can comprise multiple genes or other genetic factors within a contiguous genomic region or linkage group, such as a haplotype. An allele of a QTL can denote a haplotype within a specified window wherein said window is a contiguous genomic region that can be defined, and tracked, with a set of one or more polymorphic markers. A haplotype can be defined by the unique fingerprint of alleles at each marker within the specified window.

### Cells and Plants

[0540] The presently disclosed polynucleotides and polypeptides can be introduced into a plant cell. Any plant can be used with the compositions and methods described herein, including monocot and dicot plants, and plant elements.

[0541] In one aspect, it may be desirable to delete one or more nucleotides. In another aspect, it may be desirable to insert one or more nucleotides. In one aspect, it may be desirable to replace one or more nucleotides. In another aspect, it may be desirable to modify one or more nucleotides via a covalent or non-covalent interaction with another atom or molecule. In some aspects, the cell is diploid. In some aspects, the cell is haploid.

[0542] Genome modification via a Cas endonuclease-guide RNA complex may be used to effect a genotypic and/or phenotypic change on the target organism. Such a change is preferably related to an improved trait of interest or an agronomically-important characteristic, the correction of an endogenous defect, or the expression of some type of expression marker. In some aspects, the trait of interest or agronomically-important characteristic is related to the overall health, fitness, or fertility of the plant, the yield of a plant product, the ecological fitness of the plant, or the environmental stability of the plant. In some aspects, the trait of interest or agronomically-important characteristic is selected from the group consisting of: agronomics, herbicide resistance, insecticide resistance, disease resistance, nematode resistance, microbial resistance, fungal resistance, viral resistance, fertility or sterility, grain characteristics, commercial product production. In some aspects, the trait of interest or agronomically-important characteristic is selected from the group consisting of: disease resistance, drought tolerance, heat tolerance, cold tolerance, salinity tolerance, metal tolerance, herbicide tolerance, improved water use efficiency, improved nitrogen utilization, improved nitrogen fixation, pest resistance, herbivore resistance, pathogen resistance, yield improvement, health enhancement, vigor improvement, growth improvement, photosynthetic capability improvement, nutrition enhancement, altered protein content, altered starch content, altered carbohydrate content, altered sugar content, altered fiber content, altered oil content, increased biomass, increased shoot length, increased root length, improved root architecture, modulation of a metabolite, modulation of the proteome, increased seed weight, altered seed carbohydrate composition, altered seed oil composition, altered seed protein composition, altered seed nutrient composition, as compared to an isoline plant not comprising a modification derived from the methods or compositions herein.

[0543] Examples of monocot plants that can be used include, but are not limited to, corn (Zea mays), rice (Oryza sativa), rye (Secale cereale), sorghum (Sorghum bicolor, Sorghum vulgare), millet (e.g., pearl millet (Pennisetum glaucum), proso millet (Panicum miliaceum), foxtail millet (Setaria italica), finger millet (Eleusine coracana)), wheat (Triticum species, for example Triticum aestivum, Triticum monococcum), sugarcane (Saccharum spp.), oats (Avena), barley (Hordeum), switchgrass (Panicum virgatum), pineapple (Ananas comosus), banana (Musa spp.), palm, ornamentals, turfgrasses, and other grasses.

[0544] Examples of dicot plants that can be used include, but are not limited to, soybean (Glycine max), Brassica species (for example but not limited to: oilseed rape or Canola) (Brassica napus, B. campestris, Brassica rapa, Brassica juncea), alfalfa (Medicago sativa), tobacco (Nicotiana tabacum), Arabidopsis (Arabidopsis thaliana), sunflower (Helianthus annuus), cotton (Gossypium arboreum, Gossypium barbadense), and peanut (Arachis hypogaea), tomato (Solanum lycopersicum), potato (Solanum tuberosum).

[0545] Additional plants that can be used include safflower (Carthamus tinctorius), sweet potato (Ipomoea batatus), cassava (Manihot esculenta), coffee (Coffea spp.), coconut (Cocos nucifera), citrus trees (Citrus spp.), cocoa (Theobroma cacao), tea (Camellia sinensis), banana (Musa spp.), avocado (Persea americana), fig (Ficus casica), guava (Psidium guajava), mango (Mangifera indica), olive (Olea europaea), papaya (Carica papaya), cashew (Anacardium occidentale), macadamia (Macadamia integrifolia), almond (Prunus amygdalus), sugar beets (Beta vulgaris), vegetables, ornamentals, and conifers.

[0546] Vegetables that can be used include tomatoes (Lycopersicon esculentum), lettuce (e.g., Lactuca sativa), green beans (Phaseolus vulgaris), lima beans (Phaseolus limensis), peas (Lathyrus spp.), and members of the genus Cucumis such as cucumber (C. sativus), cantaloupe (C. cantalupensis), and musk melon (C. melo).

[0547] Ornamentals include azalea (Rhododendron spp.), hydrangea (Macrophylla hydrangea), hibiscus (Hibiscus rosasanensis), roses (Rosa spp.), tulips (Tulipa spp.), daffodils (Narcissus spp.), petunias (Petunia hybrida), carnation (Dianthus caryophyllus), poinsettia (Euphorbia pulcherrima), and chrysanthemum.

[0548] Conifers that may be used include pines such as loblolly pine (Pinus taeda), slash pine (Pinus elliotii), ponderosa pine (Pinus ponderosa), lodgepole pine (Pinus contorta), and Monterey pine (Pinus radiata); Douglas fir (Pseudotsuga menziesii); Western hemlock (Tsuga canadensis); Sitka spruce (Picea glauca); redwood (Sequoia sempervirens); true firs such as silver fir (Abies amabilis) and balsam fir (Abies balsamea); and cedars such as Western red cedar (Thuja plicata) and Alaska yellow cedar (Chamaecyparis nootkatensis).

[0549] In certain embodiments of the disclosure, a fertile plant is a plant that produces viable male and female gametes and is self-fertile. Such a self-fertile plant can produce a progeny plant without the contribution from any other plant of a gamete and the genetic material comprised therein. Other embodiments of the disclosure can involve the use of a plant that is not self-fertile because the plant does not produce male gametes, or female gametes, or both, that are viable or otherwise capable of fertilization.

[0550] The present disclosure finds use in the breeding of plants comprising one or more introduced traits, or edited genomes.

[0551] While the invention has been particularly shown and described with reference to a preferred embodiment and various alternate embodiments, it will be understood by persons skilled in the relevant art that various changes in form and details can be made therein without departing from the spirit and scope of the invention. For instance, while the particular examples below may illustrate the methods and embodiments described herein using a specific plant, the principles in these examples may be applied to any plant. Therefore, it will be appreciated that the scope of this invention is encompassed by the embodiments of the inventions recited herein and in the specification rather than the specific examples that are exemplified below. All cited patents and publications referred to in this application are herein incorporated by reference in their entirety, for all purposes, to the same extent as if each were individually and specifically incorporated by reference.

### EXAMPLES

[0552] The following are examples of specific embodiments of some aspects of the invention. The examples are offered for illustrative purposes only, and are not intended to limit the scope of the invention in any way. Efforts have been made to ensure accuracy with respect to numbers used (e.g., amounts, temperatures, etc.), but some experimental error and deviation should, of course, be allowed for.

[0553] The meaning of abbreviations is as follows: “sec” means second(s), “min” means minute(s), “h” means hour(s), “d” means day(s), “μL” or “uL” or “ul” means microliter(s), “mL” means milliliter(s), “L” means liter(s), “μM” means micromolar, “mM” means millimolar, “M” means molar, “mmol” means millimole(s), “μmole” or “μmole” mean micromole(s), “g” means gram(s), “μg” or “ug” means microgram(s), “ng” means nanogram(s), “U” means unit(s), “bp” means base pair(s) and “kb” means kilobase(s).

[0554] Knockouts of the Zea mays NAC7 transcription factor with an RNAi construct has been demonstrated to result in improved yield of maize plants under optimal growth conditions by delaying leaf senescence. However, some events also exhibited knock-down expression of other NAC family members, as well as increase in grain moisture. To specifically knockout ZM-NAC7 and assess yield advantage, we generated single gene knockout (KO) plants in Variety A using CRISPR/Cas9 editing tool, and studied their phenotypes. Specific deletion of ZM-NAC7 by CRISPR/Cas9 can delay leaf senescence that may lead to increase photosynthesis period and improve source capacity. Kernel number and kernel weight per ear at maturity were increased based on measurements for ear traits. No significant increase in grain moisture after partial deletion of NAC7 was observed.

### Example 1: Generation of ZM-NAC7 Mutant Alleles by Genome Editing

[0555] The genomic polynucleotide sequence of the Zea mays NAC7 gene in maize Variety A is given as SEQID NO:1, with the CDS given as SEQID NO:2 and the amino acid sequence given as SEQID NO:3.

[0556] To generate knockout variants of ZM-NAC7, two guide RNAs at CR1 and CR2 sites were designed (Table 2) for target sequences SEQID NO:236 (CR1) and SEQID NO:237 (CR2). Guide RNA gRNA1 (SEQID NO:14) followed by AGG was designed to cut at the position between −292 and −291 upstream of the start codon ATG (FIG. 1). Guide RNA gRNA2 (SEQID NO:15) followed by CGG was designed to cut at the position between 122 and 123 (numbered from the start codon ATG). Therefore, perfect cleavages on both CR1 and CR2 would lead to a 413 bp deletion as described in FIG. 2.

[0557] The two gRNAs were built into a single plasmid construct in two expression cassettes both under the controls of ZM-U6 POLIII CHR8 promoter (SEQID NO:35) and ZM-U6 POLIII CHR8 terminator (TTTTTTTT). Via point particle-gun bombardment, the efficiency of these two gRNAs were tested in a transient embryo assay. CR1 showed transformation efficiency of 2.11% and CR2 of 1.1%. In addition, large fragment deletions between the two cleavage sites were identified.

[0558] Next, a plasmid was transformed through bombardment into immature maize embryos together with a helper plasmid that carried coding cassettes for the Cas9 protein (SEQID NO:30 encoded by SEQID NO:37), color marker AmCYAN1 (SEQID NO:31), and NPTII resistance (SEQID NO:32), the 2^{nd} helper plasmid with ZmODP2 (SEQID NO:33) and Kanamycin resistance (SEQID NO:34), and a plasmid containing coding cassettes for ZmWUS2 (SEQID NO:36) and Kanamycin resistance (SEQID NO:34). Selected plantlets from embryo callus were transferred to soil and allowed to grow into full plants. In total, 27 TO plants were identified and analyzed.

### Example 2: Identification of ZM-NAC7 Mutants from Edited Events

[0559] At V3-V4 stage, all TO plants were sampled for genotyping with two sets of PCR primers and three PCR reactions to amplify the surrounding regions of CR1 and CR2 individually and the combined CR1-CR2 region. Primers designed were: GSP1 (SEQID NO:10), GSP2 (SEQID NO:11), GSP3 (SEQID NO:12), and GSP4 (SEQID NO:13). PCR reactions on wildtype plants yielded products of 78 bp, 104 bp, and 511 bp. The three different PCR products from each TO plant were sequenced by NextGen Illumina sequencing. The sequence of Event 1 amplified by GSP1 and GSP2 is given as SEQID NO:4. The sequence of Event 1 amplified by GSP3 and GSP4 is given as SEQID NO:5. The sequence of Event 2 amplified by GSP1 and GSP2 is given as SEQID NO:6. The sequence of Event 2 amplified by GSP3 and GSP4 is given as SEQID NO:7. The sequence of Event 3 amplified by GSP1 and GSP2 is given as SEQID NO:8. The sequence of Event 3 amplified by GSP3 and GSP4 is given as SEQID NO:9.

[0560] Out of the 27 TO plants, 15 were selected to move forward after genotyping. Seven of the 15 set seeds after being backcrossed to the parental maize event. Five of them were selected for T1 testing because their editing may have disrupted the ZM-NAC7 open reading frame, with one event later discarded because of vector backbone insertion. After genomic sequencing and vector plasmid detection analysis, T1 plants with the desired editing but without vector backbone insert for each TO parent were selected. As summarized in Table 3, Events 1, 2, and 3 had partial promoter deletion (−13 to 76 bp), and deletion (−5 bp) or insertion (+1 bp) at exon 1. The deletion or insertion at exon 1 is close to its N-terminus and before DNA binding motif of NAC7, demonstrating that the editing strategy created a non-functional NAC7 allele in all three events. The detailed sequence changes observed from Events 1, 2 and 3 are described in FIGS. 3, 4, and 5. These plants were backcrossed to the parental event again to generated heterozygous T2 seeds for field test, and also self-pollinated to produce segregating T2 seeds for phenotypic and grain yield studies.

### Example 3: ZM-NAC7 Knockout Edits Showed a Significant Delay in Senescence

### Dark-Induced Senescence

[0561] Dark-induced leaf senescence is a quick way to evaluate specific gene function in leaf senescence and stay-green. The experiment was done by detaching leaves and placing them in the dark. To examine the phenotype of ZM-NAC7 knockout edits, 7 inches of V15 leaf tips were collected and put into 50 mL Falcon tubes with 10 mL of deionized water. The tubes were placed in an incubator at 22° C. with 78% relative humidity in the constant dark.

[0562] By day 10, a noticeable difference in leaf color between the Null leaves and the heterozygous (Het) and homozygous (Hom) leaves were clearly observed. Leaf tips from the Hom and Het knockout (KO) plants of all three events demonstrated delays in leaf senescence when compared with Nulls at day 13 of dark treatment (FIG. 6). Pictures shown in FIG. 6 were taken at days 0 and 13. Results are representatives of two independent experiments performed in triplicates. ZM-NAC7 knockout edits demonstrated a stay-green phenotype.

### Quantification of Chlorophyll Level in ZM-NAC7 KO Edits

[0563] In the dark-induced senescence experiment, the Het leaves showed an intermediate stay-green phenotype between Null and Hom leaves. To address whether the stay-green phenotype was dependent on the expression level of ZM-NAC7, the chlorophyll content in dark treated leaves of three genotypes were compared. Dualex instrument was used to measure chlorophyll level at 11 am for 12 days. Tables 4a and 4b show before dark treatment (day 0), there wasn't significant difference in chlorophyll level among Null, Het and Hom leaves, except for Event 3. However, at day 12, at construct level, both Het and Horn leaves had a significant higher chlorophyll content than those of Null leaves (26.06 μg/cm²). The chlorophyll content of Het and Horn leaves was similar (35.02 and 38.07 μg/cm², respectively). The stay-green effect caused by knockout of ZM-NAC7 may be dominant in Het plants.

### Example 4: Deletion of ZM-NAC7 Increased Kernel Number and Kernel Weight Per Ear

### Kernel Number Increases in ZM-NAC7 Knockout Edits

[0564] To evaluate potential yield efficacy of ZM-NAC7 knockout edits, plants were grown to maturity in the greenhouse. After a black layer appeared, ears were harvested. Ear photometry images were taken from each plant and analyzed for ear component traits. After that, ears were shelled by hand and kernel number per ear were counted by a DRELLO seed counter.

[0565] Tables 5a and 5b show that both Event 2 and 3 had kernel number increase compared with Null. Between these two, Event 2 had the higher yield efficacy potentials. Kernel number of Horn plants of Event 2 was significantly higher than that of Null plants (p=0.0043). At the construct level, average kernel number per ear of Null, Het and Horn is 241, 264 and 296 kernels, respectively. There is significantly statistical difference in kernel increase between Horn and Null (p=0.0378) in construct level. Horn plants of Event 1 didn't show kernel number increase, although it showed stay-green phenotype as listed in Tables 4a and 4b.

### Kernel Weight Increases in ZM-NAC7 Knockout Edits

[0566] In addition to kernel number increase, we also observed kernel weight increase from ZM-NAC7 knockout plants. Shelled kernels were oven dried at 70° C. for 72 hr after harvest. Tables 6a and 6b demonstrate that, at the construct level, average kernel dry weight per ear showed the similar upward trend from null (50.93 g), to Het (55.53 g) and Horn (63.15 g). The kernel weight increase from Null to Horn is statistically different (p=0.0273) at construct level.

[0567] There was no significant increase in single kernel weight among Null, Het and Horn plants (data not shown). Our findings demonstrated that partial deletion of ZM-NAC led to yield per plant increase, caused by kernel number increase and kernel weight per ear increase.

### Example 5: Ear Components of ZM-NAC7 Edits Studied by Ear Photometry

[0568] To identify key ear traits that determine yield increase in ZM-NAC7 knockout edits, ear component parameters were measured by ear photometry image analysis. Partial deletion of ZM-NAC7 increased kernel number (Tables 7a and 7b) and ear volume (Tables 8a and 8b) based on photometry data. Similar to the results obtained from the kernel counter, Event 2 was more efficacious in kernel number increase as Hom plants have average of 354 kernels/ear compared with 236 kernels/ear from Null plants (p=0.0065). Overall at the construct level, both kernel number and ear volume showed significantly increase from Null to Hom with p=0.0421 and p=0.034, respectively. The improvement on these beneficial ear traits are attributes for yield increase caused by ZM-NAC7 knockout.

### Example 6: Partial Deletion of NAC7 Didn't Increase Kernel Moisture

[0569] To evaluate if deletion of NAC7 and delayed senescence caused grain moisture increase, kernel moisture of NAC7 KO edits was determined by the drying method using methodologies standard in the art (see, for example, Risius et al., Biosystems Engineering 156:120-135, 2017; and Hurburgh et al., Transactions of the ASAE 28:634-640, 1985), shown as the percentage of (fresh weight−dry weight)/fresh weight in Tables 9a and 9b. Kernel fresh weight was measured right after the harvest. Dry weight (Table 5b) was measured for each cob after kernels were removed from the cob, and were oven dried at 70° C. for 72 hr. At the construct level, average grain moisture of Null, Het and Hom plants was 19.7%, 20.95% and 20.93%, respectively. There was no statistical difference between Null, Het and Hom in all 3 events. FIG. 7 shows harvest moisture of hybrids that expressing UBI:NAC7 RNAi, as a comparison. Harvest moisture of hybrids expressing THE NAC7 RNAI CONSTRUCT (UBI:NAC7 RNAi) is presented. Statistical difference between THE NAC7 RNAI CONSTRUCT and the bulk null at construct level were determined by the mixed model with spatial adjustment (Gilmour et al., 2009). In two years' field test, plants with NAC7 RNAi transgene had 2-4% grain moisture increase. Our data demonstrated that CRISPR-Cas edited NAC7 KO plants with specific NAC7 deletion minimized grain moisture increase while providing improved yield.

### Example 7: Hybrid Yield Test for NAC7 KO Edits

[0570] As described above, we observed that both Hom and Het plants with ZM-NAC7 deletion showed stay-green phenotype and increases in ear component parameters, such as kernel number per ear, kernel weight per ear, and ear volume. Although Hom plants were more efficacious for kernel number increase compared with Het plants, there is no statistical difference in chlorophyll content between Hom and Het plants. Yield improvements may be obtained in maize with endogenous NAC7 gene edits in only one allele.

### Example 8: Additional Strategies to Generate NAC7 KO Edits and Downregulated NAC7 Function

[0571] In addition to the ZM-NAC7 partial deletion in Variety A as discussed above, three additional editing protocols for ZM-NAC7 are tested.

### Whole Gene Deletion

[0572] Two guide RNAs are used to generate full gene dropout in Variety B and Variety C as illustrated in the middle panel of FIG. 1. These two edits from both NSS and SS will enable testing of the hybrid yield efficacy of ZM-NAC7 deletion, with a potential stronger efficacy as demonstrated from Hom inbred plants as described above. Guide RNA sequences for the gene deletion experiments are given as SEQID NOs:16-19.

### Modulate Promoter Region of NAC7 by Genome Editing

[0573] Cis-regulatory elements in promoter region may regulate ZM-NAC7 expression and function. Therefore, an alternative approach to downregulate expression of NAC7 is achieved by deleting selected nucleotides in the upstream expression element promoter region. In Variety A, HC69 and Variety B, around 1.2 Kb sequence upstream of the ATG is highly conserved. There is also a significant amount of repetitive DNA present in the promoter region of NAC7. These sequences are targeted for editing to modulate NAC7 expression. Guide RNA sequences for the promoter editing experiment are given as SEQID NOs:22-29.

### Example 9: Structural Analysis and DNA Binding Motif Modification of NAC Proteins

[0574] There are two NAC7 homologs with 3D structure solved (Arabidopsis NAC domain-containing protein 19, SEQID NO:227 and Oryza sativa PDB:3ULX, SEQID NO:228). Both structures exhibited similarity, with the Arabidopsis variant additionally having an oligo-DNA bound. Based on the Arabidopsis structure (PDB:3 SWM, Weiner et al, Biochem 7 444:395-404, 2012), a ZmNAC7 model was built.

### N-Terminal Region

[0575] NAC7's N-terminal domain (1-174 aa) binds the DNA duplex. The major structure core consisted of a 6 stranded beta sheet (β2-β3-β7-β6-β5-β4) (FIG. 8A). The alpha helices α2 and α3 flanked the sheet's β2-β3 on both sides while the β5-β4 curled significantly forming semi-barrel with help of β3′ (FIG. 8B). NAC7 functions as a homodimer (FIG. 8C). The dimer is related with 2-fold axis and its interface is formed by N-terminal peptide including α1-loop-β1. The central β-sheet's β4 edge (with the motif YWKATGKDR (SEQID NO:229)) inserts into the DNA duplex major groove, determining the sequence recognition specificity (FIG. 9). This motif in the Zea mays NAC7 variant sequence (SEQID NO:3) is shown as a dashed line box on FIG. 10. Other elements including loops spanning β3-β3′ loop, β5-β6, and β7-C-ter interact with the DNA phosphate backbone, mainly providing binding energy.

### C-Terminal Region

[0576] The C-terminal region had relatively low sequence complexity, with mainly hydrophilic residues. It belongs to a so-called intrinsic disordered protein, suitable for protein-protein interaction. Related proteins from uniref90_plant database with homology on the C-terminal domain were aligned together. Conserved regions of the Zea mays NAC7 variant (SEQID NO:3), consistent with the predicted helix areas, are shown as solid line boxed areas in FIG. 11. The polyproline segment (PATPPPPPLPP (SEQID NO:230)) is associated with protein recognition, and usually assumes polyproline II helix structure, providing an excellent docking site for aromatic residues (FIGS. 12A and 12B). There was also an important C-terminal motif (AAGAVVASSAWMNHF (SEQID NO:231)).

### Modify DNA Binding Motif of ZM-NAC7 by Fragment Replacement

[0577] Protein structural model of NAC7 shows the central β-sheet (amino acid sequence: YWKATGKDR given as SEQID NO:229) inserts into DNA duplex major groove, which likely determines the recognition specificity of NAC7 transcription factor activity. Other elements, including loops spanning β3-β3′ loop, β5-β6, and β7-C-ter, interact with the DNA phosphate backbone and provide binding energy. To downregulate the function of Zm-NAC7 without interrupting the activity of its potential interactors, an NAC7 edit with modified DNA binding motif to abolish its DNA binding capability was tested (lower panel of FIG. 1). The amino acids “AAAAAGG” (SEQID NO:235) substituted the DNA binding motif “YWKATGK” (SEQID NO:229) in ZM-NAC7 by guided Cas9, as shown in FIG. 1. Guide RNA sequences for the binding motif null are given as SEQID NOs:20-21.

[0578] FIG. 9 shows the motif of the protein binding region in the DNA major groove. NAC7 comprises two major domains, the N-terminal (1-174 aa) DNA binding domain (DBD) and the C-terminal (175-338 aa) intrinsic disorder domain (ID).

### Example 10: Sequence Analysis of NAC Proteins

[0579] Over 150 Maize NAC sequences (SEQID NOs:38-226) were identified and analyzed, and a phylogenetic tree created based on the sequence motif implicated in target DNA binding, the central β-sheet's β4 edge region. Table 1 lists some of the key motifs for NAC7 protein activity. Any variation in any of the sequences or motifs described herein has the potential to alter the specificity and/or affinity of the NAC protein. FIG. 13 shows the phylogenetic tree for the maize NAC proteins, with clustering of the sequences for the central β-sheet's β4 edge region, where it inserts into the DNA duplex major groove (as described above). Table 10 lists some of the motif variations in maize for the sequences corresponding to the β-sheet's β4 edge region. FIG. 14 shows a sequence alignment, with the β-sheet's β4 edge region variations outlined in black boxes. Table 11 shows the frequency of occurrence of different conserved motifs.

[0580] The gene editing methods described herein may be used to modify any NAC gene in any plant, including crop plants, such as but not limited to maize, soybean, cotton, canola, wheat, sorghum, sunflower, barley, or rice, to effect modulation or knockout of expression or activity, to improve a trait of agronomic or commercial importance.

### Tables

TABLE 1
Sequence Motifs of NAC proteins

| Description | Sequence |
|---|---|
| central β-sheet's β4 edge | YWKATGKDR |
| motif consensus variation 1 | |
| central β-sheet's β4 edge | RWHKTGKTR |
| motif consensus variation 2 | |
| central β-sheet's β4 edge | FWKATGRDK |
| motif consensus variation 3 | |
| central β-sheet's β4 edge | YWKATGADK |
| motif consensus variation 4 | |
| polyproline segment | PATPPPPPLPP |
| associated with protein | |
| recognition | |
| C-terminal motif | AAGAVVASSAWMNHF |

TABLE 2
Experimental rationale

| | Description of | |
|---|---|---|
| Editing rationale | genome edits | Target Position |
| Delete part of the promoter | In frame deletion or | −291 to 122 in NAC7 |
| and part of the first exon/ | out-of-frame edit | Variety A gene |
| coding region | | |

TABLE 3
Edited plants show partial promoter deletion,
and exon 1 deletion or an insertion

| Event | Modification at CR sites |
|---|---|
| Event 1 | CR1: −13bp; CR2: +1bp |
| Event 2 | CR1: −55bp; CR2: −5bp |
| Event 3 | CR1: −76bp; CR2: +1bp |

TABLE 4a
Knock out of NAC7 delayed senescence and increased
chlorophyll level (ug/cm²) in leaf

| | | Day 0 | | | Day 12 | | |
|---|---|---|---|---|---|---|---|
| | | Least | | Signi- | Least | | Signi- |
| | Geno- | Sq | Std | ficance | Sq | Std | ficance |
| | type | Mean | Error | level | Mean | Error | level |
| Event 1 | Null | 43.53 | 0.99 | A | 28.05 | 2.01 | A |
| | Het | 46.48 | 0.99 | A | 34.50 | 2.01 | A |
| | Hom | 46.15 | 0.99 | A | 41.81 | 2.01 | B |
| Event 2 | Null | 43.04 | 2.11 | A | 20.28 | 2.36 | A |
| | Het | 43.04 | 2.11 | A | 37.01 | 2.36 | B |
| | Hom | 45.68 | 2.11 | A | 34.64 | 2.36 | B |
| Event 3 | Null | 46.00 | 1.92 | A | 29.86 | 2.07 | A |
| | Het | 42.74 | 1.92 | AB | 33.56 | 2.07 | AB |
| | Hom | 36.91 | 1.92 | B | 37.76 | 2.07 | B |
| Aggregate | Null | 44.19 | 1.11 | A | 26.06 | 1.34 | A |
| | Het | 44.09 | 1.11 | A | 35.02 | 1.34 | B |
| | Hom | 42.91 | 1.11 | A | 38.07 | 1.34 | B |

TABLE 4b
Knock out of NAC7 delayed senescence and increased
chlorophyll level (ug/cm²) in leaf

| | Geno- | Geno- | Day 0 | | Day 12 | |
|---|---|---|---|---|---|---|
| | type | type | Difference | p-Value | Difference | p-Value |
| Event 1 | Hom | Null | 2.62 | 0.1662 | 13.76 | 0.0002 |
| | Hom | Het | −0.33 | 0.9701 | 7.31 | 0.0428 |
| | Het | Null | 2.95 | 0.1079 | 6.45 | 0.0801 |
| Event 2 | Hom | Null | 2.64 | 0.6537 | 14.35 | 0.0007 |
| | Hom | Het | 2.64 | 0.6538 | −2.37 | 0.7591 |
| | Het | Null | 0.00 | 1.0000 | 16.72 | 0.0001 |
| Event 3 | Hom | Null | −9.08 | 0.0074 | 7.91 | 0.0321 |
| | Hom | Het | −5.83 | 0.1019 | 4.20 | 0.3389 |
| | Het | Null | −3.25 | 0.4671 | 3.71 | 0.4272 |
| Aggregate | Hom | Null | −1.27 | 0.6955 | 12.01 | <.0001 |
| | Hom | Het | −1.17 | 0.7345 | 3.05 | 0.246 |
| | Het | Null | −0.10 | 0.9977 | 8.96 | <.0001 |

TABLE 5a
Knock out of NAC7 increased kernel number per ear

| | | Least Sq | Std | Significance |
|---|---|---|---|---|
| | Genotype | Mean | Error | level |
| Event 1 | Null | 279.93 | 27.65 | A |
| | Het | 254.08 | 21.42 | A |
| | Hom | 241.09 | 32.29 | A |
| Event 2 | Null | 222.44 | 23.69 | A |
| | Het | 266.30 | 21.19 | AB |
| | Hom | 334.81 | 23.69 | B |
| Event 3 | Null | 219.93 | 31.06 | A |
| | Het | 273.53 | 26.66 | A |
| | Hom | 295.85 | 25.99 | A |
| Aggregate | Null | 240.82 | 16.00 | A |
| | Het | 263.67 | 13.41 | AB |
| | Hom | 296.30 | 15.65 | B |

TABLE 5b
Knock out of NAC7 increased kernel number per ear

| | Genotype | Genotype | Difference | p-Value |
|---|---|---|---|---|
| Event 1 | Hom | Null | −38.84 | 0.6344 |
| | Hom | Het | −12.99 | 0.9400 |
| | Het | Null | −25.85 | 0.7416 |
| Event 2 | Hom | Null | 112.38 | 0.0043 |
| | Hom | Het | 68.51 | 0.0892 |
| | Het | Null | 43.86 | 0.3591 |
| Event 3 | Hom | Null | 75.92 | 0.1567 |
| | Hom | Het | 22.32 | 0.3968 |
| | Het | Null | 53.60 | 0.8210 |
| Aggregate | Hom | Null | 55.48 | 0.0378 |
| | Hom | Het | 32.63 | 0.2562 |
| | Het | Null | 22.85 | 0.5189 |

TABLE 6a
Knock out of NAC7 increased kernel dry weight (g) per ear

| | | Least Sq | Std | Significance |
|---|---|---|---|---|
| | Genotype | Mean | Error | level |
| Event 1 | Null | 60.80 | 5.97 | A |
| | Het | 54.41 | 4.63 | A |
| | Hom | 55.04 | 6.98 | A |
| Event 2 | Null | 43.31 | 5.32 | A |
| | Het | 54.29 | 4.76 | A |
| | Hom | 59.89 | 5.01 | A |
| Event 3 | Null | 49.07 | 5.97 | A |
| | Het | 58.31 | 5.13 | AB |
| | Hom | 71.37 | 5.27 | B |
| Aggregate | Null | 50.93 | 3.36 | A |
| | Het | 55.53 | 2.81 | AB |
| | Hom | 63.15 | 3.28 | B |

TABLE 6b
Knock out of NAC7 increased kernel dry weight (g) per ear

| | Genotype | Genotype | Difference | p-Value |
|---|---|---|---|---|
| Event 1 | Hom | Null | −5.76 | 0.81 |
| | Hom | Het | 0.63 | 1.00 |
| | Het | Null | −6.40 | 0.68 |
| Event 2 | Hom | Null | 16.58 | 0.0694 |
| | Hom | Het | 5.61 | 0.6979 |
| | Het | Null | 10.98 | 0.2816 |
| Event 3 | Hom | Null | 22.30 | 0.0197 |
| | Hom | Het | 13.06 | 0.1881 |
| | Het | Null | 9.23 | 0.4749 |
| Aggregate | Hom | Null | 12.22 | 0.0273 |
| | Hom | Het | 7.63 | 0.1854 |
| | Het | Null | 4.59 | 0.5472 |

TABLE 7a
Ear photometry result showed that knock out
of NAC7 increased kernel number per ear

| | | Least Sq | Std | Significance |
|---|---|---|---|---|
| | Genotype | Mean | Error | level |
| Event 1 | Null | 319.24 | 32.20 | A |
| | Het | 292.96 | 24.94 | A |
| | Hom | 286.06 | 37.60 | A |
| Event 2 | Null | 236.35 | 26.40 | A |
| | Het | 298.49 | 24.23 | AB |
| | Hom | 354.43 | 25.61 | B |
| Event 3 | Null | 262.72 | 35.10 | A |
| | Het | 322.32 | 30.13 | A |
| | Hom | 341.88 | 29.37 | A |
| Aggregate | Null | 272.18 | 18.09 | A |
| | Het | 303.48 | 15.29 | AB |
| | Hom | 333.53 | 17.52 | B |

TABLE 7b
Ear photometry result showed that knock out
of NAC7 increased kernel number per ear

| | Genotype | Genotype | Difference | p-Value |
|---|---|---|---|---|
| Event 1 | Hom | Null | −33.18 | 0.7817 |
| | Hom | Het | −6.90 | 0.9872 |
| | Het | Null | −26.29 | 0.7959 |
| Event 2 | Hom | Null | 118.08 | 0.0065 |
| | Hom | Het | 55.94 | 0.2610 |
| | Het | Null | 62.14 | 0.2029 |
| Event 3 | Hom | Null | 79.16 | 0.2043 |
| | Hom | Het | 19.56 | 0.8880 |
| | Het | Null | 59.60 | 0.4082 |
| Aggregate | Hom | Null | 61.35 | 0.0421 |
| | Hom | Het | 30.05 | 0.4017 |
| | Het | Null | 31.30 | 0.3856 |

TABLE 8a
Ear photometry result showed that knock
out of NAC7 increased ear volume (cm³)

| | | Least Sq | Std | Significance |
|---|---|---|---|---|
| | Genotype | Mean | Error | level |
| Event 1 | Null | 695.31 | 26.32 | A |
| | Het | 722.28 | 21.73 | A |
| | Hom | 681.54 | 30.73 | A |
| Event 2 | Null | 582.28 | 31.96 | A |
| | Het | 652.73 | 29.33 | A |
| | Hom | 680.11 | 30.13 | A |
| Event 3 | Null | 636.16 | 37.83 | A |
| | Het | 675.80 | 32.47 | A |
| | Hom | 738.68 | 32.47 | A |
| Aggregate | Null | 636.72 | 19.07 | A |
| | Het | 685.53 | 16.52 | AB |
| | Hom | 703.62 | 18.47 | B |

TABLE 8b
Ear photometry result showed that knock
out of NAC7 increased ear volume (cm³)

| | Genotype | Genotype | Difference | p-Value |
|---|---|---|---|---|
| Event 1 | Hom | Null | −13.78 | 0.9382 |
| | Hom | Het | −40.74 | 0.5299 |
| | Het | Null | 26.96 | 0.7111 |
| Event 2 | Hom | Null | 97.83 | 0.0763 |
| | Hom | Het | 27.38 | 0.7926 |
| | Het | Null | 70.45 | 0.2450 |
| Event 3 | Hom | Null | 102.52 | 0.1097 |
| | Hom | Het | 62.88 | 0.3647 |
| | Het | Null | 39.63 | 0.7078 |
| Aggregate | Hom | Null | 66.90 | 0.0340 |
| | Hom | Het | 18.08 | 0.7462 |
| | Het | Null | 48.81 | 0.1326 |

TABLE 9a
Partial deletion of NAC7 didn't significantly
increase kernel moisture (%)

| | | Least Sq | Std | Significance |
|---|---|---|---|---|
| | Genotype | Mean | Error | level |
| Event 1 | Null | 20.32% | 1.09% | A |
| | Het | 21.93% | 0.84% | A |
| | Hom | 18.67% | 1.33% | A |
| Event 2 | Null | 20.49% | 1.02% | A |
| | Het | 20.95% | 0.91% | A |
| | Hom | 22.11% | 0.96% | A |
| Event 3 | Null | 18.12% | 1.06% | A |
| | Het | 19.59% | 0.90% | A |
| | Hom | 20.99% | 0.86% | A |
| Aggregate | Null | 19.73% | 0.62% | A |
| | Het | 20.95% | 0.52% | A |
| | Hom | 20.93% | 0.59% | A |

TABLE 9b
Partial deletion of NAC7 didn't significantly
increase kernel moisture (%)

| | Genotype | Genotype | Difference | p-Value |
|---|---|---|---|---|
| Event 1 | Hom | Null | −1.65% | 0.6062 |
| | Hom | Het | −3.26% | 0.1072 |
| | Het | Null | 1.61% | 0.4752 |
| Event 2 | Hom | Null | 1.62% | 0.4842 |
| | Hom | Het | 1.16% | 0.6587 |
| | Het | Null | 0.46% | 0.9391 |
| Event 3 | Hom | Null | 2.87% | 0.1011 |
| | Hom | Het | 1.40% | 0.5053 |
| | Het | Null | 1.47% | 0.5486 |
| Aggregate | Hom | Null | 1.19% | 0.3479 |
| | Hom | Het | −0.03% | 0.9994 |
| | Het | Null | 1.22% | 0.2891 |

TABLE 10
Exemplary NAC protein motif variations in maize

| SEQID | |
|---|---|
| NO: | motif |
| 238 | RWHKTGASK |
| 239 | RWHKTGKTK |
| 240 | RWHKTGKTR |
| 241 | RWHKTGNTK |
| 242 | RWHKTGRSK |
| 243 | RWHKTGSSK |
| 244 | RWKPSGKEK |
| 245 | RWRPAGKEK |
| 246 | TWHSEAKPK |
| 247 | VWRPSGKET |
| 248 | YWKAAGTPG |
| 249 | YWKATGADK |
| 250 | YWKATGADR |
| 251 | YWKATGKDC |
| 252 | YWKATGKDK |
| 253 | YWKATGKDR |
| 254 | YWKATGKEE |
| 255 | YWKATGKEK |
| 256 | YWKATGPDR |
| 257 | YWKATGSPS |
| 258 | YWKATGTDK |
| 259 | YWKITGKDC |
| 260 | YWKSTGKDR |
| 261 | YWKTSGKDR |
| 262 | YWKTTGKDK |
| 263 | YWKTTGKDR |
| 264 | YWNPAGADE |
| 265 | YWSSVCADE |

TABLE 11
Frequency of conserved motifs

| Motif | Occurrence |
|---|---|
| YWKATGKDR | 27 |
| FWKATGRDK | 18 |
| YWKATGADK | 13 |
| YWKATGTDK | 6 |
| YWKATGKDK | 6 |
| YWKSTGKDR | 4 |
| YWKATGADR | 4 |
| RWHKTGKTR | 4 |
| FWKATGTDR | 4 |
| FWKATGSDR | 4 |
| YWKTTGKDK | 3 |
| YWKAAGTPG | 3 |
| FWKATGIDR | 3 |
| YWKTTGKDR | 2 |
| YWKTSGKDR | 2 |
| YWKATGKEK | 2 |
| VWRPSGKET | 2 |
| RWRPAGKEK | 2 |
| RWHKTGRSK | 2 |
| YWSSVCADE | 1 |
| YWNPAGADE | 1 |
| YWKITGKDC | 1 |
| YWKATGSPS | 1 |
| YWKATGPDR | 1 |
| YWKATGKEE | 1 |
| YWKATGKDC | 1 |
| TWHSEAKPK | 1 |
| RWKPSGKEK | 1 |
| RWHKTGSSK | 1 |
| RWHKTGNTK | 1 |
| RWHKTGKTK | 1 |
| RWHKTGASK | 1 |
| LWKATGRDK | 1 |
| FWKATGIDK | 1 |
| CWRSDSGVK | 1 |
| CWKKIGSPR | 1 |
| CWKKIGSHI | 1 |
| CWHSEAGAK | 1 |
| CWHNEAKAR | 1 |

We claim:

1. A method of modifying an endogenous genomic locus of a plant, wherein the locus comprises a polynucleotide encoding a NAC polypeptide, said method comprising:
a. providing to at least one cell of the plant a molecular modification agent, and
b. introducing one or more genetic modifications at the genomic locus that results in a reduced expression of the NAC polypeptide or reduced activity of the NAC polypeptide, as compared to a control plant not comprising the one or more genetic modifications;
wherein the one or more genetic modifications is selected from the group consisting of:
an insertion of at least one nucleotide, the deletion of at least one nucleotide, the substitution of at least one nucleotide, the molecular alteration of at least one nucleotide, and any combination of the preceding.

2. The method of claim 1, wherein the one or more genetic modifications a the genomic locus results in improved health, improved stay-green phenotype, delayed senescence, or higher yield of the plant that comprises the one or more genetic modifications at the genomic locus.

3. The method of claim 1, wherein insertion or deletion of at least one nucleotide in or near the NAC coding region effects a frameshift in the endogenous NAC gene.

4. The method of claim 1, wherein a regulatory expression element of the endogenous NAC gene is altered.

5. The method of claim 1, wherein at least 5 bases of the endogenous NAC gene are deleted.

6. The method of claim 1, wherein at least 1 base of the endogenous NAC gene is inserted.

7. The method of claim 1, wherein a functional motif of the endogenous NAC gene is edited or replaced.

8. The method of claim 7, wherein the functional motif is selected from the group consisting of:
a. a DNA interaction domain comprising at least two beta sheets and a sequence comprising a tryptophan, an acidic residue, and a basic residue;
b. a protein recognition domain comprising an alpha helix with a plurality of proline residues; and
c. a C-terminal domain comprising a tryptophan.

9. The method of claim 1, wherein a plurality of sites of the endogenous NAC gene are altered.

10. The method of claim 9, wherein at least one of the plurality of sites is upstream of the coding region.

11. The method of claim 1, wherein the modification agent is a Cas endonuclease.

12. The method of claim 11, further comprising a guide polynucleotide that is capable of hybridizing with a sequence at or near the endogenous genomic locus.

13. The method of claim 1, wherein the plant is maize.

14. The method of claim 13, wherein the one or more genetic modifications a the genomic locus results in greater average kernel number per ear or greater average kernel dry weight per ear of the maize plant.

15. The method of claim 1, wherein the NAC polypeptide is NAC7.

16. The method of claim 15, wherein the average grain moisture of the kernels from a cob of a plant produced by the method is not more than 2% higher than that of a null control.

17. The method of claim 15, wherein the NAC7 polypeptide comprises a sequence that shares at least 80% sequence identity with SEQID NO:3.

18. The method of claim 1, comprising introducing a first modification at a position between −291 and −292 bases upstream of the start codon of the NAC polypeptide, and introducing a second modification at a position between 122 and 123 bases downstream of the start codon of the NAC polypeptide.

19. A method of altering the binding specificity of a NAC protein in a plant, the method comprising introducing an edit to a sequence motif comprising: N1-N2-N3-N4-N5-N6-N7-N8-N9, wherein:
a. N1=F, R, T, V, or Y;
b. N2=W;
c. N3=H, K, R, N, or S;
d. N4=S, P, T, I A, or K;
e. N5=T, S, A, V, or E;
f. N6=G, A, or C;
g. N7=R, K, A, S, T, P, or N;
h. N8=D, S, T, E, or P; or
i. N9=K, E, C, G, T, or R.

20. The method of claim 19, comprising edits of at least two of the positions in the motif.

The application's sequence listing, which the Patent Office published only in electronic form, follows.

SEQUENCE LISTING (403 sequences)

SEQ ID NO: 1 - DNA, 8082 bp, Zea mays
cgctttgctttgtcgcgacgcgagcctgcgcgttgcgttcgtggcgtcggggagggggggggatggcaagcgccggtttgctgtattggtcacgtgatgcggctgcgcaacggccggggccagggcggtgccgccgcggcgacgggatcgcgcgtggttggtgtgacggacgggtgggggcgcaccgagcgcatgccgcctccatgaggattgaggaggccctcccgtccggatgcatcacacatgccactggcttggctggctgggacgtgatcccctgcaccggctacgtgttcttccttctcaccgagaagatgctgacaatgaaaacggcggcctcgtcacggctccgacgcgatccgtgggcgggcgggcgcgtccctcgccggagctggcgccgcgtgtcgccttctctggaacgccacgtgcctgcgtgcgcgcgcgcgcgcgagacgtcctagtccccagtgatttcgcttggaaattttttttatccgaatcttgagggtctggaggagcttcatggctaccgagtgcccgtcagcccgtggtatttttaggtgtgaacggagcccggttctcgtcggatcgccagctttaataagcacgaggtagtaggtgcgaagaggagaacggccttaactaactgctctcctcacgctgccaggaatgagcttgacgacggtgctagctggcacgaccttattaattttttattactatattactagaaaacgattgatcacggcgaaaattaagcactcgcctcatgacccgatcctccgaagccccttcgcatcacggcgctttgcggtgcttgtctttgacttcttcttttttttaaaaaaaaactcgcaatgggtagtacacacgatagccgcagtctttaaaagttgattactcttctcaatctgacctgacgtttggctcaagtcgaactcgagccgggaaaaaataaatatattagttaacaactaaaccctcctgtaaattaagcctaagtacctaggatacgtccctcctgcctctaactacttttttattactatctttattatcgatagaatctagggtgtgtttgtttagcgggttgacgcgggttggaacagattcaacacataacaactcgtgtttggtttaaaaggctcgcgggttagattggttccgggtcgaaatacgtcttgaaaatatgggttctaaggattcctaaaaacaagcgaaccatttcgacccacttcctctctaccctactgtcacccatgtcttatccactcgagaccagcacagggcgtgccgccactgtcgagggaccccgccgacctaccctccgacgttaatcccctgcctgccactagtcgtcggtcccccactggcctacccgccagcatgctggcctccgccagcgccgtcagactccctgaccggcttgttgcgcctcccaccgtcagactcctcggctggcatgccctccgatgtcgtggtgttctccgataggcacaacttgcgagccttgctagtgctgtcgtcgaacaggtaaaggtcagtgctcgtcatcgcctagacaagcctgctagtcatgtcaaatgttaaaaattcactgaaatgtatcttagtgttgttgggatgttcctttaactataactgaaatgtaacagtgagacctcatcactaaaaaattatgacttggttaataatggctttaatttatgtatatattgtgcttattgatttctcaaatattaaaatagtgtcgtttcatttattttgaatgttgtcatcttattgaattgaattgaagatatatcattttgggtaatatgaccagtaaggttactatattaagtttatccctcatcatgaaataaataagagatggtgtagctactatgagttctatgtctatctagtgtccatgccggacatgtttcgttgcatgcttaatagtagcgccgagagcgttccctcctcttctcgcaagcgtgcctgccaactttgaaaaaaaaaatatcttagatatacctttgctctttgctttgagcgcttgtattttgtccttctgtttcttctttaccgagttaagtgcttaactagcatttgtggcaatcaccatcgatcatctgatctatggctgcatctttcttcaatcttggatgtggacttgacctagcccacgcacaacgacacctgcagagtaactgttagcccactaattatctactaccaaacgcaaggttttcaaaatctcccctgtatatacatatatggctttcaatcccgcaaatagatacgttcattcataggagtacgcacgtgtgccgtgcacgagggtctcggtttataccgtcttcttttttttttgaagaagaaaaaaaataaacttgtcctaagcaggacgtacggtagcacctactgccaataagatatatattgctgctggtaaaatattttataatgtttatgatcttatcattgaaaatttcgtgtgaagtttttaaatttaaaattcaaattttataaacggtcttggatgtagaaactattaaaataaaacttttagatctcaaaaagttatgcaactttatagttggtcacattttcaaatgaactcatttagtgccttaaataatcaaattactctcgatttgttatagtacatgggaaatggaaacgtaatataaatataattggtgtaatagtgtagtgctatagaagggtatgcgcgagagagaggttgcgagttcgaatctcaccatttacaaaacatataagtttgattcaaaataatagtgaaaaatgatagggcaacgggtaagggtagggttggagagttgttcctagaatttaaaaaatgttttgctgttttttttttaatttttttgattcttaatttgccgagtgtttttctttgccgagtgctttttgacactcggcaaagtctttgccgagtgtccgaaaaaaacactcggcaaagaaccctttgccgatgaaatctttgtcgagtgttaagcctttgtcgagtgtaaaatagtctttgccgagtgtcttagacactcggcaaagaacgtgattccggtagtgaatagatacgttcattcataggagtacgcacgtgtgccgtgcaggagggtctcggtttacaccatgttctttttttagaagaaaaaaattaaacttgtcctaagcaggacgtacggtagcacctactgccaataagatatatattgctgctggtaaaatattttataatgtttatggctttataatgtttaaacttgtcctaatagctgacacatgacagactctaacctttcagtttccttgaaaagcagtaggccagcagccacaccccaggcgacagatggcgcgatcgtccacatggtggaggtggatagcagcaatccaggcttttccagtttggttccaaggcggcctccgtgtttttaattttacacacacatatatacatcctcctctcgttttcttcggccacttcttttttcttcttcttcttctttttgttgcacacatatatgtattccagggaaatttcccttggtgtgtgccatatacatgcatgtggaggagacggggatggagagctgtgagctagtcccctttgtactacagaaagaaagtgcgtgctgcccttatttctggaatgaaaaggcagaatgggaagagggggaaaaaaggggatagatagatgtggaggttgagggagacccacaccaccatataaacccccctcttccaaactagtcacacatggcacaagcacacagctcatcagttcttcttcgtcgtcttggctagctgcctagctagctagctagttcctcactcctctccgagaaccccctttttcatctctctctctctctctcggtctcgcccagctcctttcgatgttatcgtctctgctggcctcgcaactcgtcgagagagactcgtgaaaaagaatccagatatagctagagagaccgagagggcagctagcatgtcgatgagcttcttgagcatggtggaggcggagctgccgccggggttccggttccacccgagggacgacgagctcatctgcgactacctcgcgcccaagctcggcgccaagcccggcttctccggctgccgcccgcccatggtcgacgtcgacctcaacaaggtcgagccatgggatctccccggtgagtacgtacgtccacgcaagtagctagataaatcttttttttaatttgctagcgctcctttctttttctacgaccttcttctcagctaataaaagctagctagctgtgcgtcttccttgattaattcctccatgatacttgcaccaagttgatgcatatatgcgcacggagaggagaaagatgcagagaaatcacacacgtcaaatttccctagcttgctcgacacaacacgatccttaaatctgtccctgtttattatattctagtccacgatcaaaactcacagctttttccgtttttttaaataaaacacagcctcttaatttctgctgttttttttaaaaaaatcatgattttccagaataaagctatttgggatcgatcctctgttgcttcagcgtcaagagaaacaccacacgagtccccggccaaatgtgctgttcatacactaaactgctgcacacacatcacaccactctcctacatacttttatttttcgtcagcaagctagctaggatattaatatcgacgttttgctacctaaacctttagaaataattcatgatcgatctcgttttcatgcctatatatgatcatttccttgtcttcctcttcactcggtatatgttttctatacctcttctttttgttaccatgaacttgacttgttgatgacgcctccccaacaaatgaatagttatgaccagctgtattttaagtcggaggtcaaactaaaattaagcagtaggtatacacacaccattaattaattgaaaaacacatcgatttaatttgttttccgttcgtcggctgtaattatccaatttgtacacgatggtttctttgtttgtttctgaaaccttctcgcgcgcgcggtggtataatatcaacgtcacgatcagagtacgcgtgtacacgtactgcgctctcgatatgcacaagaccacactaacaaagctagccaagcgtccgtcgtttggacgagctttttgccaatctaaaaagaagagtaaatttaatttgaatcatttggggtggttcatctaaattcaccgcgaggaacgacaaccctctgctatatggtatatctctcgatttgtttaagctggtgaagccgtcctgctgcctgccaaatagatagactctagcaactactgagttttaaaaagagaaacaaaattaaagaatgacaaccttttacggccaaaccccttttaacgtctggccaacgaatcttctcttcgacctgttttagcttgtgtccaaaatgctttccgtcgtagccctgcgttcgttactagataccgctcaccatttgatcttgattatgaaaacattgaccttatatatatatatatatatatatagccaagtattttttaatctaatatggaataagagaaaaactaatgtgcgtgcaactatcagaagcaaaattttctgtttttttcttctaacattgttgggtaaattagaattcaaaattttatgtatcggtatactatatattataataccctccagctcagattcaaatccgttttagataattaatagattcatacaacacttaatggtgtgtgtacatgttttatacacgtgtctagattcattatcatctatttgaatatagtagacataaaaatcaagatcaaaaccgaatactactttagcacggagtgagtaaaagtataagtataatattttttggggatatttgggatttttttaattttgattacacgacgattatattatattgtacggccggggaagcgttgattgtgcacagactgcatgccgtacaaactgcaagaataatcgtacatgtacatgcatgctgatgaactgaaagatcttgagctcgtggccctcctaatttgttaaataaaaatgcacatcggaaagcaacaaactgcaaatcacgccttacgcatgagatctcagattcccagcacgctctctctctctctctctgtctgcacatcacgtcacgtgtccctcccctcttgtgaattgatgcccggatcagcacactactggtagcagaaggtcccaaaactaagctatgcatgggcgggctacatacatacaccacccccatgctatttctagcagagtggctccaaacctcagcatccacagtacaggctacagcgtgtggttgtgatggtgaccacaagaatcctactacatgcatgctgatgatgtgctgcagtgaacactcactcactgcccatgaacagcgtctcctacctgccagccagtgccaagaacaatgaatgaatgattaactgctggcttcgcttgctgaaccattcccctcctcgtgtgcgcatgatgggcatgcagtggcggcgtcggtggggccgcgggagtggtacttcttcagcctcaaggaccgcaagtacgcgacggggcagcggacgaaccgggccacggtgtccgggtactggaaggcgacggggaaggaccgaccagtggtggcggcgcggcgaggcgcgctggtggggatgcgcaagacgctcgtgttctaccaggggagggcgcccaagggcaggaagacggagtgggtgatgcacgagtacaggatggagccagctgctcctcttcttgatcaccaaccctcctcatccaactccaaggtaaaatcggtcgatccattattcgatgaaacgacaagttaagactccattaattcgacgaactgaccgggggtgttttaactgtttcgttgtcgtccatcgatccttctcctgtcatcatgtcaccagcaggatgaagattgggtgctgtgcagagtcatctgcaagaagaaactggcagcaggaggccgcgcaggagggggcagctcgaggagcctggtcgccagcaacggcggccgcgagaccgcgccagccaccccgccgccgccgccgctgccacctcgcatggacacggacgccaccctagcacagctccaggccgccatgcacgccaccgccggcgcgctcgagcaggtgccctgcttctccagcttcaacaacaacactgccagctctagagctgctgccgcagcagcagcagcgcagccatgctacctgcccagcatggccacaggcggcagccacggcacgacgagctactacctagaccacgcgatgctgccgcctgagctgggtggctgcttcgatcctctccacggcgacaagaagctgctcaaggcggtgctgggccagctcggcggcgacgcggtggcgccgggcctgagcctgcagcacgagatggccgcgggcgctgtcgtcgcttcatccgcttggatgaatcacttctaggggacattagttcagcagcgaacctaagtatgtgattggttgcgtatattatgggaaatacatacatatatacataattgtgtggtgaaacatttgtgtgtgaggcaaggagtagagcatgcgtcatttttttggttgctgccgatcgatttggacgaaggccatgaggcaaggagtagaactctgtaatataatgatggctgctcaagtgtgtgtacacattcagatgcagaggtcgtatgtcatgagcgatgatcaggagaatttcagattggttattttactgtgcctgaactcaaccccaagatcacacttgacaccactcactcactcactcactcagagacacagtgcacattcatagaatcatcatggtaaacagacagaagacagaacagtggctgccaaacccaatcaatcatgccatttatgcaggaaagtaggcatgacagtcacatccgagcatctcttctttaccacaccatctttctttttccgatgtgtattgttgcgatgacaatcatgctaaccaagcagtcagctgagtgagggctcctgggcactggctttccactgcact

SEQ ID NO: 2 - DNA, 1017 bp, Zea mays
atgtcgatgagcttcttgagcatggtggaggcggagctgccgccggggttccggttccacccgagggacgacgagctcatctgcgactacctcgcgcccaagctcggcgccaagcccggcttctccggctgccgcccgcccatggtcgacgtcgacctcaacaaggtcgagccatgggatctccccgtggcggcgtcggtggggccgcgggagtggtacttcttcagcctcaaggaccgcaagtacgcgacggggcagcggacgaaccgggccacggtgtccgggtactggaaggcgacggggaaggaccgaccagtggtggcggcgcggcgaggcgcgctggtggggatgcgcaagacgctcgtgttctaccaggggagggcgcccaagggcaggaagacggagtgggtgatgcacgagtacaggatggagccagctgctcctcttcttgatcaccaaccctcctcatccaactccaaggatgaagattgggtgctgtgcagagtcatctgcaagaagaaactggcagcaggaggccgcgcaggagggggcagctcgaggagcctggtcgccagcaacggcggccgcgagaccgcgccagccaccccgccgccgccgccgctgccacctcgcatggacacggacgccaccctagcacagctccaggccgccatgcacgccaccgccggcgcgctcgagcaggtgccctgcttctccagcttcaacaacaacactgccagctctagagctgctgccgcagcagcagcagcgcagccatgctacctgcccagcatggccacaggcggcagccacggcacgacgagctactacctagaccacgcgatgctgccgcctgagctgggtggctgcttcgatcctctccacggcgacaagaagctgctcaaggcggtgctgggccagctcggcggcgacgcggtggcgccgggcctgagcctgcagcacgagatggccgcgggcgctgtcgtcgcttcatccgcttggatgaatcacttctag

SEQ ID NO: 3 - protein, 338 aa, Zea mays
MSMSFLSMVEAELPPGFRFHPRDDELICDYLAPKLGAKPGFSGCRPPMVDVDLNKVEPWDLPVAASVGPREWYFFSLKDRKYATGQRTNRATVSGYWKATGKDRPVVAARRGALVGMRKTLVFYQGRAPKGRKTEWVMHEYRMEPAAPLLDHQPSSSNSKDEDWVLCRVICKKKLAAGGRAGGGSSRSLVASNGGRETAPATPPPPPLPPRMDTDATLAQLQAAMHATAGALEQVPCFSSFNNNTASSRAAAAAAAAQPCYLPSMATGGSHGTTSYYLDHAMLPPELGGCFDPLHGDKKLLKAVLGQLGGDAVAPGLSLQHEMAAGAVVASSAWMNHF

SEQ ID NO: 4 - DNA, 65 bp, Zea mays
tgaaaaggcagaatgggaagagggggaaaaaaggggatagataagggagacccacaccaccatat

SEQ ID NO: 5 - DNA, 105 bp, Zea mays
gacgagctcatctgcgactacctcgcgcccaagctcggcgccaagcccggctttctccggctgccgcccgcccatggtcgacgtcgacctcaacaaggtcgagcc

SEQ ID NO: 6 - DNA, 79 bp, Zea mays
tgaaaaggcagaatgggaagagggggaaaaaaggggatagatagatgctcatcagttcttcttcgtcgtcttggctagc

SEQ ID NO: 7 - DNA, 105 bp, Zea mays; identical to SEQ ID NO: 5

SEQ ID NO: 8 - DNA, 79 bp, Zea mays
tgaaaaggcagaatgggaagagggggaaaaaaggggatagatagatcacacatggcacaagcacacagctcatcagttc

SEQ ID NO: 9 - DNA, 99 bp, Zea mays
gacgagctcatctgcgactacctcgcgcccaagctcggcgccaagcccggctggctgccgcccgcccatggtcgacgtcgacctcaacaaggtcgagcc

SEQ ID NO: 10 - DNA, 20 bp, Artificial
  oligo
tgaaaaggcagaatgggaag

SEQ ID NO: 11 - DNA, 20 bp, Artificial
  oligo
ggagacccacaccaccatat

SEQ ID NO: 12 - DNA, 20 bp, Artificial
  oligo
gacgagctcatctgcgacta

SEQ ID NO: 13 - DNA, 19 bp, Artificial
  oligo
acctcaacaaggtcgagcc

SEQ ID NO: 14 - DNA, 17 bp, Artificial
  guide RNA
gggatagatagatgtgg

SEQ ID NO: 15 - DNA, 17 bp, Artificial
  guide RNA
gccaagcccggcttctc

SEQ ID NO: 16 - DNA, 20 bp, Artificial
  guide RNA
gttgtcctaagcaggacgta

SEQ ID NO: 17 - DNA, 20 bp, Artificial
  guide RNA
gactacctcgcgcccaagct

SEQ ID NO: 18 - DNA, 20 bp, Artificial
  guide RNA
gcatatcaggaacagtgcag

SEQ ID NO: 19 - DNA, 20 bp, Artificial
  guide RNA
gaattaatctaccgcccgtc

SEQ ID NO: 20 - DNA, 22 bp, Artificial
  guide RNA
gacggggcagcggacgaaccgg

SEQ ID NO: 21 - DNA, 21 bp, Artificial
  guide RNA
ccattaattcgacgaactgac

SEQ ID NO: 22 - DNA, 20 bp, Artificial
  guide RNA
gttcgcatcacggcgctttg

SEQ ID NO: 23 - DNA, 20 bp, Artificial
  guide RNA
ggacaggagggacgtatcct

SEQ ID NO: 24 - DNA, 20 bp, Artificial
  guide RNA
gacgggcgcactcatgcgta

SEQ ID NO: 25 - DNA, 20 bp, Artificial
  guide RNA
gttatctactaccaaacaca

SEQ ID NO: 26 - DNA, 20 bp, Artificial
  guide RNA
gaattaatctaccgcccgtc

SEQ ID NO: 27 - DNA, 20 bp, Artificial
  guide RNA
gttgtcctaagcaggacgta

SEQ ID NO: 28 - DNA, 20 bp, Artificial
  guide RNA
gttccagtttggttccaagg

SEQ ID NO: 29 - DNA, 20 bp, Artificial
  guide RNA
gtgcgtgctgcccttatttc

SEQ ID NO: 30 - protein, 1368 aa, Streptococcus pyogenes [sequence omitted]

SEQ ID NO: 31 - DNA, 690 bp, Anemonia majano
atggccctgtccaacaagttcatcggcgacgacatgaagatgacctaccacatggacggctgcgtgaacggccactacttcaccgtgaagggcgagggcagcggcaagccctacgagggcacccagacctccaccttcaaggtgaccatggccaacggcggccccctggccttctccttcgacatcctgtccaccgtgttcatgtacggcaaccgctgcttcaccgcctaccccaccagcatgcccgactacttcaagcaggccttccccgacggcatgtcctacgagagaaccttcacctacgaggacggcggcgtggccaccgccagctgggagatcagcctgaagggcaactgcttcgagcacaagtccaccttccacggcgtgaacttccccgccgacggccccgtgatggccaagaagaccaccggctgggacccctccttcgagaagatgaccgtgtgcgacggcatcttgaagggcgacgtgaccgccttcctgatgctgcagggcggcggcaactacagatgccagttccacacctcctacaagaccaagaagcccgtgaccatgccccccaaccacgtggtggagcaccgcatcgccagaaccgacctggacaagggcggcaacagcgtgcagctgaccgagcacgccgtggcccacatcacctccgtggtgcccttctga

SEQ ID NO: 32 - DNA, 795 bp, Escherichia coli
atggttgaacaagatggattgcacgcaggttctccggccgcttgggtggagaggctattcggctatgactgggcacaacagacaatcggctgctctgatgccgccgtgttccggctgtcagcgcaggggcgcccggttctttttgtcaagaccgacctgtccggtgccctgaatgaactgcaggacgaggcagcgcggctatcgtggctggccacgacgggcgttccttgcgcagctgtgctcgacgttgtcactgaagcgggaagggactggctgctattgggcgaagtgccggggcaggatctcctgtcatctcaccttgctcctgccgagaaagtatccatcatggctgatgcaatgcggcggctgcatacgcttgatccggctacctgcccattcgaccaccaagcgaaacatcgcatcgagcgagcacgtactcggatggaagccggtcttgtcgatcaggatgatctggacgaagagcatcaggggctcgcgccagccgaactgttcgccaggctcaaggcgcgcatgcccgacggcgatgatctcgtcgtgacccatggcgatgcctgcttgccgaatatcatggtggaaaatggccgcttttctggattcatcgactgtggccggctgggtgtggcggaccgctatcaggacatagcgttggctacccgtgatattgctgaagagcttggcggcgaatgggctgaccgcttcctcgtgctttacggtatcgccgctcccgattcgcagcgcatcgccttctatcgccttcttgacgagttcttctga

SEQ ID NO: 33 - DNA, 2133 bp, Zea mays
atggccactgtgaacaactggctcgctttctccctctccccgcaggagctgccgccctcccagacgacggactccacactcatctcggccgccaccgccgaccatgtctccggcgatgtctgcttcaacatcccccaagattggagcatgaggggatcagagctttcggcgctcgtcgcggagccgaagctggaggacttcctcggcggcatctccttctccgagcagcatcacaaggccaactgcaacatgatacccagcactagcagcacagtttgctacgcgagctcaggtgctagcaccggctaccatcaccagctgtaccaccagcccaccagctcagcgctccacttcgcggactccgtaatggtggcttcctcggccggtgtccacgacggcggtgccatgctcagcgcggccgccgctaacggtgtcgctggcgctgccagtgccaacggcggcggcatcgggctgtccatgattaagaactggctgcggagccaaccggcgcccatgcagccgagggtggcggcggctgagggcgcgcaggggctctctttgtccatgaacatggcggggacgacccaaggcgctgctggcatgccacttctcgctggagagcgcgcacgggcgcccgagagtgtatcgacgtcagcacagggtggagccgtcgtcgtcacggcgccgaaggaggatagcggtggcagcggtgttgccggcgctctagtagccgtgagcacggacacgggtggcagcggcggcgcgtcggctgacaacacggcaaggaagacggtggacacgttcgggcagcgcacgtcgatttaccgtggcgtgacaaggcatagatggactgggagatatgaggcacatctttgggataacagttgcagaagggaagggcaaactcgtaagggtcgtcaagtctatttaggtggctatgataaagaggagaaagctgctagggcttatgatcttgctgctctgaagtactggggtgccacaacaacaacaaattttccagtgagtaactacgaaaaggagctcgaggacatgaagcacatgacaaggcaggagtttgtagcgtctctgagaaggaagagcagtggtttctccagaggtgcatccatttacaggggagtgactaggcatcaccaacatggaagatggcaagcacggattggacgagttgcagggaacaaggatctttacttgggcaccttcagcacccaggaggaggcagcggaggcgtacgacatcgcggcgatcaagttccgcggcctcaacgccgtcaccaacttcgacatgagccgctacgacgtgaagagcatcctggacagcagcgccctccccatcggcagcgccgccaagcgcctcaaggaggccgaggccgcagcgtccgcgcagcaccaccacgccggcgtggtgagctacgacgtcggccgcatcgcctcgcagctcggcgacggcggagccctggcggcggcgtacggcgcgcactaccacggcgccgcctggccgaccatcgcgttccagccgggcgccgccagcacaggcctgtaccacccgtacgcgcagcagccaatgcgcggcggcgggtggtgcaagcaggagcaggaccacgcggtgatcgcggccgcgcacagcctgcaggacctccaccacctgaacctgggcgcggccggcgcgcacgactttttctcggcagggcagcaggccgccgccgctgcgatgcacggcctgggtagcatcgacagtgcgtcgctcgagcacagcaccggctccaactccgtcgtctacaacggcggggtcggcgacagcaacggcgccagcgccgtcggcggcagtggcggtggctacatgatgccgatgagcgctgccggagcaaccactacatcggcaatggtgagccacgagcaggtgcatgcacgggcctacgacgaagccaagcaggctgctcagatggggtacgagagctacctggtgaacgcggagaacaatggtggcggaaggatgtctgcatgggggactgtcgtgtctgcagccgcggcggcagcagcaagcagcaacgacaacatggccgccgacgtcgggcatggcggcgcgcagctcttcagtgtctggaacgacacttaa

SEQ ID NO: 34 - DNA, 810 bp, Escherichia coli
atgagccatattcaacgggaaacgtcgaggccgcgattaaattccaacatggatgctgatttatatgggtataaatgggctcgcgataatgtcgggcaatcaggtgcgacaatctatcgcttgtatgggaagcccgatgcgccagagttgtttctgaaacatggcaaaggtagcgttgccaatgatgttacagatgagatggtcagactaaactggctgacggaatttatgcctcttccgaccatcaagcattttatccgtactcctgatgatgcatggttactcaccactgcgatccccggaaaaacagcattccaggtattagaagaatatcctgattcaggtgaaaatattgttgatgcgctggcagtgttcctgcgccggttgcattcgattcctgtttgtaattgtccttttaacagcgatcgcgtatttcgtctcgctcaggcgcaatcacgaatgaataacggtttggttgatgcgagtgattttgatgacgagcgtaatggctggcctgttgaacaagtctggaaagaaatgcataaacttttgccattctcaccggattcagtcgtcactcatggtgatttctcacttgataaccttatttttgacgaggggaaattaataggttgtattgatgttggacgagtcggaatcgcagaccgataccaggatcttgccatcctatggaactgcctcggtgagttttctccttcattacagaaacggctttttcaaaaatatggtattgataatcctgatatgaataaattgcagtttcatttgatgctcgatgagtttttctaa

SEQ ID NO: 35 - DNA, 1000 bp, Zea mays
tgagagtacaatgatgaacctagattaatcaatgccaaagtctgaaaaatgcaccctcagtctatgatccagaaaatcaagattgcttgaggccctgttcggttgttccggattagagccccggattaattcctagccggattacttctctaatttatatagattttgatgagctggaatgaatcctggcttattccggtacaaccgaacaggccctgaaggataccagtaatcgctgagctaaattggcatgctgtcagagtgtcagtattgcagcaaggtagtgagataaccggcatcatggtgccagtttgatggcaccattagggttagagatggtggccatgggcgcatgtcctggccaactttgtatgatatatggcagggtgaataggaaagtaaaattgtattgtaaaaagggatttcttctgtttgttagcgcatgtacaaggaatgcaagttttgagcgagggggcatcaaagatctggctgtgtttccagctgtttttgttagccccatcgaatccttgacataatgatcccgcttaaataagcaacctcgcttgtatagttccttgtgctctaacacacgatgatgataagtcgtaaaatagtggtgtccaaagaatttccaggcccagttgtaaaagctaaaatgctattcgaatttctactagcagtaagtcgtgtttagaaattatttttttatataccttttttccttctatgtacagtaggacacagtgtcagcgccgcgttgacggagaatatttgcaaaaaagtaaaagagaaagtcatagcggcgtatgtgccaaaaacttcgtcacagagagggccataagaaacatggcccacggcccaatacgaagcaccgcgacgaagcccaaacagcagtccgtaggtggagcaaagcgctgggtaatacgcaaacgttttgtcccaccttgactaatcacaagagtggagcgtaccttataaaccgagccgcaagcaccgaatt

SEQ ID NO: 36 - DNA, 909 bp, Zea mays
atggcggccaatgcgggcggcggtggagcgggaggaggcagcggcagcggcagcgtggctgcgccggcggtgtgccgccccagcggctcgcggtggacgccgacgccggagcagatcaggatgctgaaggagctctactacggctgcggcatccggtcgcccagctcggagcagatccagcgcatcaccgccatgctgcggcagcacggcaagatcgagggcaagaacgtcttctactggttccagaaccacaaggcccgcgagcgccagaagcgccgcctcaccagcctcgacgtcaacgtgcccgccgccggcgcggccgacgccaccaccagccaactcggcgtcctctcgctgtcgtcgccgccgccttcaggcgcggcgcctccctcgcccaccctcggcttctacgccgccggcaatggcggcggatcggctgtgctgctggacacgagttccgactggggcagcagcggcgctgctatggccaccgagacatgcttcctgcaggactacatgggcgtgacggacacgggcagctcgtcgcagtggccacgcttctcgtcgtcggacacgataatggcggcggccgcggcgcgggcggcgacgacgcgggcgcccgagacgctccctctcttcccgacctgcggcgacgacggcggcagcggtagcagcagctacttgccgttctggggtgccgcgtccacaactgccggcgccacttcttccgttgcgatccaacagcaacaccagctgcaggagcagtacagcttttacagcaacagcaacagcacccagctggccggcaccggcaaccaagacgtatcggcaacagcagcagcagccgccgccctggagctgagcctcagctcatggtgctccccttaccctgctgcagggagtatgtga

SEQ ID NO: 37 - DNA, 4104 bp, Streptococcus pyogenes
atggacaagaagtacagcatcggcctcgacatcggcaccaactcggtgggctgggccgtcatcacggacgaatataaggtcccgtcgaagaagttcaaggtcctcggcaatacagaccgccacagcatcaagaaaaacttgatcggcgccctcctgttcgatagcggcgagaccgcggaggcgaccaggctcaagaggaccgccaggagacggtacactaggcgcaagaacaggatctgctacctgcaggagatcttcagcaacgagatggcgaaggtggacgactccttcttccaccgcctggaggaatcattcctggtggaggaggacaagaagcatgagcggcacccaatcttcggcaacatcgtcgacgaggtggcctaccacgagaagtacccgacaatctaccacctccggaagaaactggtggacagcacagacaaggcggacctccggctcatctaccttgccctcgcgcatatgatcaagttccgcggccacttcctcatcgagggcgacctgaacccggacaactccgacgtggacaagctgttcatccagctcgtgcagacgtacaatcaactgttcgaggagaaccccataaacgctagcggcgtggacgccaaggccatcctctcggccaggctctcgaaatcaagaaggctggagaaccttatcgcgcagttgccaggcgaaaagaagaacggcctcttcggcaaccttattgcgctcagcctcggcctgacgccgaacttcaaatcaaacttcgacctcgcggaggacgccaagctccagctctcaaaggacacctacgacgacgacctcgacaacctcctggcccagataggagaccagtacgcggacctcttcctcgccgccaagaacctctccgacgctatcctgctcagcgacatccttcgggtcaacaccgaaattaccaaggcaccgctgtccgccagcatgattaaacgctacgacgagcaccatcaggacctcacgctgctcaaggcactcgtccgccagcagctccccgagaagtacaaggagatcttcttcgaccaatcaaaaaacggctacgcgggatatatcgacggcggtgccagccaggaagagttctacaagttcatcaaaccaatcctggagaagatggacggcaccgaggagttgctggtcaagctcaacagggaggacctcctcaggaagcagaggaccttcgacaacggctccatcccgcatcagatccacctgggcgaactgcatgccatcctgcggcgccaggaggacttctacccgttcctgaaggataaccgggagaagatcgagaagatcttgacgttccgcatcccatactacgtgggcccgctggctcgcggcaactcccggttcgcctggatgacccggaagtcggaggagaccatcacaccctggaactttgaggaggtggtcgataagggcgctagcgctcagagcttcatcgagcgcatgaccaacttcgataaaaacctgcccaatgaaaaagtcctccccaagcactcgctgctctacgagtacttcaccgtgtacaacgagctcaccaaggtcaaatacgtcaccgagggcatgcggaagccggcgttcctgagcggcgagcagaagaaggcgatagtggacctcctcttcaagaccaacaggaaggtgaccgtgaagcaattaaaagaggactacttcaagaaaatagagtgcttcgactccgtggagatctcgggcgtggaggatcggttcaacgcctcactcggcacgtatcacgacctcctcaagatcattaaagacaaggacttcctcgacaacgaggagaacgaggacatcctcgaggacatcgtcctcaccctgaccctgttcgaggaccgcgaaatgatcgaggagaggctgaagacctacgcgcacctgttcgacgacaaggtcatgaaacagctcaagaggcgccgctacactggttggggaaggctgtcccgcaagctcattaatggcatcagggacaagcagagcggcaagaccatcctggacttcctcaagtccgacgggttcgccaaccgcaacttcatgcagctcattcacgacgactcgctcacgttcaaggaagacatccagaaggcacaggtgagcgggcagggtgactccctccacgaacacatcgccaacctggccggctcgccggccattaaaaagggcatcctgcagacggtcaaggtcgtcgacgagctcgtgaaggtgatgggccggcacaagcccgaaaatatcgtcatagagatggccagggagaaccagaccacccaaaaagggcagaagaactcgcgcgagcggatgaaacggatcgaggagggcattaaagagctcgggtcccagatcctgaaggagcaccccgtggaaaatacccagctccagaatgaaaagctctacctctactacctgcagaacggccgcgacatgtacgtggaccaggagctggacattaatcggctatcggactacgacgtcgaccacatcgtgccgcagtcgttcctcaaggacgatagcatcgacaacaaggtgctcacccggtcggataaaaatcggggcaagagcgacaacgtgcccagcgaggaggtcgtgaagaagatgaaaaactactggcgccagctcctcaacgcgaaactgatcacccagcgcaagttcgacaacctgacgaaggcggaacgcggtggcttgagcgaactcgataaggcgggcttcataaaaaggcagctggtcgagacgcgccagatcacgaagcatgtcgcccagatcctggacagccgcatgaatactaagtacgatgaaaacgacaagctgatccgggaggtgaaggtgatcacgctgaagtccaagctcgtgtcggacttccgcaaggacttccagttctacaaggtccgcgagatcaacaactaccaccacgcccacgacgcctacctgaatgcggtggtcgggaccgccctgatcaagaagtacccgaagctggagtcggagttcgtgtacggcgactacaaggtctacgacgtgcgcaaaatgatcgccaagtccgagcaggagatcggcaaggccacggcaaaatacttcttctactcgaacatcatgaacttcttcaagaccgagatcaccctcgcgaacggcgagatccgcaagcgcccgctcatcgaaaccaacggcgagacgggcgagatcgtctgggataagggccgggatttcgcgacggtccgcaaggtgctctccatgccgcaagtcaatatcgtgaaaaagacggaggtccagacgggcgggttcagcaaggagtccatcctcccgaagcgcaactccgacaagctcatcgcgaggaagaaggattgggacccgaaaaaatatggcggcttcgacagcccgaccgtcgcatacagcgtcctcgtcgtggcgaaggtggagaagggcaagtcaaagaagctcaagtccgtgaaggagctgctcgggatcacgattatggagcggtcctccttcgagaagaacccgatcgacttcctagaggccaagggatataaggaggtcaagaaggacctgattattaaactgccgaagtactcgctcttcgagctggaaaacggccgcaagaggatgctcgcctccgcaggcgagttgcagaagggcaacgagctcgccctcccgagcaaatacgtcaatttcctgtacctcgctagccactatgaaaagctcaagggcagcccggaggacaacgagcagaagcagctcttcgtggagcagcacaagcattacctggacgagatcatcgagcagatcagcgagttctcgaagcgggtgatcctcgccgacgcgaacctggacaaggtgctgtcggcatataacaagcaccgcgacaaaccaatacgcgagcaggccgaaaatatcatccacctcttcaccctcaccaacctcggcgctccggcagccttcaagtacttcgacaccacgattgaccggaagcggtacacgagcacgaaggaggtgctcgatgcgacgctgatccaccagagcatcacagggctctatgaaacacgcatcgacctgagccagctgggcggagac

SEQ ID NO: 38 - protein, 633 aa, Zea mays
KSLIRSDDPEWFFFAPKDRKYPNGSRSNRATEAGYWKATGKDRIIKSKGDKRKQHTIGMKKTLVFHRGRAPKGERTGWIMHEYRTTEPEFESGEQGGYVLYRLFRKQEEKTERSSPEEVDRSGYSPTPSRSSPDNLEANEEANTPLNKESPESALHESPIELPKSVETNGGSMTRWLADRNDNLMVTAPDVSHIPFHGHAAGVAKVDPSVGASGHLVNPHNGNDDYNKFVSDFTPILPLENAFFTDIQQGAFGFDGIMNPLDPLDAFLNQTLVDPDEHSSTTSKVQYDSDIPTEFENHWNMKVEPQDDQCWWANIGFEPDEPNPLLPCDTTDQDILSVDSGADSFNELFNSMEETGIIVRPQQLDSTVQPNHVFASQGNAARRLRLQVESREIITKDESEDEVSCVLTPDCLNDSVEESTAEKDVASDGDEAESTGIVIRSHHPAPRSSSESSFTQQGTAMQRLRLQSGLNKGQRPSTDDSSSCIIDEPGSQHKAEKAEIEEDASTNLAGSADDLPGNIHDDEQKNIPEHGAEMTSPEAKSVLRLRKTSEEGNKDVKQESCLEPHVRAPMQKGGFQSYIIWLVLPVALLLLLCVGTYGWNFRFLNPVTDGLLICWRVRIRLDMPQHGLRGYKD

SEQ ID NO: 39 - protein, 381 aa, Zea mays
MEGERNDINVQRSDEILMPGFRFHPTDEELVSFYLRRKIQQKPISIELIRQLDIYKYDPWDLPKLASTGEKEWYFYCPRDRKYRNSVRPNRVTAAGFWKATGTDRPIYSSEGTKCVGLKKSLVFYRGRAARGMKTDWMMHEFRLPSLTDPKRPVDKTIPLNDSWTICRIFKKTSSMAQRALSHTWGPPLPGATAEADMFAALQSVQASELALERSLSLQAAPPAPAAGQFTSTHGLHSQHHHQQQKGVNNPSLDGASCRLINFTSSPSEEPENFPITFPFEVQAPHRAAAPVFFGAHPDNRLGGFVVDSSADVSGCIGGRSQDSSTGKPSSGFSANSSDWETAGRINFPFDLGADSSEEWRCSIPWESFLSPAAVQAELPR

SEQ ID NO: 40 - protein, 246 aa, Zea mays
MEGRRPGAPVAGLPIGFRFRPTDEELLLHYLRRKALACPLPAGVIPDADLARLHPWDLLPAAAPGGSGADADGERFFFHRPATQCWRKGGGAARAAGTGVWRPSGKETLVLSPRCKRPVGTKRTLVFCPRRGRARTHWAMHEYRLLPAGLHPYGCAAGAGANAPPPTNVSSHGGDAAADWVVCRIFRRARPAHRARLGGGAREELEEEHAAEESPSSCVTDASETLDQEEDDGDEGSSSSTVASSN

SEQ ID NO: 41 - protein, 241 aa, Zea mays
MGVEWYFYCLRDRKYPVVLCTNRATAVGYWKITGKDCEVHSGRSGATAEQRTIRSILDRGKTTTTLGKVNNDNLSRLLTEYIGMDNMLALVCKTYDGVKGLDKYDKDDIIDKTSGVHGLGRAVGKFLYGRITVFCLENLSKNLKVKFVVTTDVSSLPENVVEMEEQVKRKNWQKEMVLEDMKREEDLLKQVKELYRKQKQELMDYVTQPAVTQTSRDSPATHSPATPGSNPFGAKLSNKWW

SEQ ID NO: 42 - protein, 362 aa, Zea mays
MSPKKPAAPGATDPAAYTSPRDEDTNDGWVLVTAGVGRPPRPPPRRGNSPDDLVGRYLPARRALRWSELPPQIHDADVYGAHPAFLAKVHPPANGGDRLEWFFFVCRGRGLGGKRRAGRGAYRLVGEAKPVAAWYCHSFRYYEDAAEASASRETGWRMDEYGDRSDVSGAGAFDMVVCKVYPARGGVLHRRLVQHSTTPAEKRAVVPVKPQVLVQLYLASRSVGDPLRCRMHHATDVCADHPAVLTAVLPPANDRFEWFFVVRRPRTKHGDDAIIGFPRRAGPGQYVPATRYWCVKDGEGRNMGYLLVFLYREDDEATRRLSRAEKWWMEEYGFGPDFPYDDNDNDVEELVVFKVHLRMTRR

SEQ ID NO: 43 - protein, 154 aa, Zea mays
MVADVAKLSTNEWYFFSFRDRKYATGLRTNRATKSGYWKATGKDRVIHTPCSWPAAAAGHHCTVVGMRKTLVFYRGRTPNGVKTSWVMHEFRMENPHTPPKEDWVLCRVFYKKKADAMDYADCSDQDAIAVHMPRGSADPRGAAVAASGRGGRQ

SEQ ID NO: 44 - protein, 320 aa, Zea mays
MDQAAEESCVPPGFRFHPTEEELVGYYLARKVASQRIDLDIIQEVDLYRIEPWDLQERCKPQHAGGGHDEQTQEWYFFSYKDRKYPSGTRTNRATAAGFWKATGRDKPVLSSSTRTTRCSRVIGMRKTLVFYKGRAPNGRKSDWIMHEYRLQSNEHAPAQEEGWVVCRAFQKPIPNQRPFFPTSYAGYYDHNLSTTARLHVDGDRHFLAGSSAAAAALLQQPPGLAGSSFPQLYSDDDLESKKQLLSIPPLESPTAMACCSDAGGYAQRSSYDEHEMMMMMIQQGGGGGEQAAAAIDWNFLDSLLSATSQLHGPSGSLLQ

SEQ ID NO: 45 - protein, 245 aa, Zea mays
MAPVGLPPGFRFHPTDEELVNYYLKRKIHGLKIELDIIPEVDLYKCEPWELADKSFLPSRDPEWYFFGPRDRKYPNGFRTNRATRAGYWKSTGKDRRVLHHGGRSIGMKKTLVYYRGRAPQGVRTDWVMHEYRLDDKDAEDTLPIQDTYALCRVFKKNAICTEVDGLQAQCSMALLEGACQQLLTSGSQEYQTSSPDVPVASTSGGADDDAEKDESWMQFISDDAWCSSTADGAEESTSRVALAS

SEQ ID NO: 46 - protein, 664 aa, Zea mays
MALWALPVGFRFHPTDEELVSHYLKGKITGQINSEAEVIPEIDICKCEPWDLPGKSLIRSDDPEWFFLAPKDRKYPNGSRSNRATVAGYWKATGPDRNIKSKGDKSKQFTIGKKKTLVFHRGRAPKGERTGWIMHEYRTTEPQFESGKQGGYVLYRLFWKPEEKTERSSPKEMDRSGNSPTTIRSSRDNQEANEEANTPLNKKSLESALHDPIELPNSAETPAGPRKMCLADRNDNLVATAPVVSHIPFQGHAAGVAKVDPSAAASAHFVNPQNGNDDCNNFMSDFTPILPHENAFFTGTQQGAFGFDGNGIMNHPDALDAFLNQTLVDTDEHSSTTSKVQYDSDIPTEFANHWNMQDEHQDWWEKLDFEPYEPTLLPYDTTDLDVLSVDSGADSFNDLFNVTGITLRPQQLDSTVQPDCVFPDQGTALRRLKLQVVECGESITKDESEDEVSCVESPNYFDESVEFAAEKGVASYGDGADSTGIVIRSRYPAPSSSSESSFTQQGTAMRRLRLQLGLNEGTCPSSGDSSSCIVDESESQQKAEIEEDASTNLAGSVDNLPGNSHDDEQKDIPEHDAEMSVSGVKSVLRLRKTSAESLKDVKQEDCLEPDGRAPMQRVGFQSSIIWLVLSVAVLLLLYCGVWMSMICILVRCFAHMGSWHQPDV

SEQ ID NO: 47 - protein, 709 aa, Zea mays
METPPRGRWPPGFRFSPTDEELVLYFLKRRIASGRPSPYVADVEVYKSHPSHLPERSALQTGDRQWFFFSRMDRKYPNGSRASRTTGDGYWKATGKDRFICGGGRAVGNKKTLVYHHGRAPRGERTDWVMHEYTLLADALPPAAQGREFYALYKLFQKSGAGPKNGEQYGAPFREEDWLDDDDERVIAGAAANPVPNTNSPPSTMEEHAITDRELPIEGLDQPLSDFGNDPELFSEAQPVSSHGQGQGWLSEGGDKAEVVDASISNDVVVVAENTCTDISLGDIEQFLMQISDDQQNDELFSDLSTPLPKLQFQCDDRQVWLDAEMGHEVYAADPTASSGAVVTAECTVTELPLGDLEGLLLQIANDQHMVESQSDLSAPTPHHNFNQADIGDLHESHGARVGNLSCIVQESTFCEPRTEPSDQFPQSNVTNLPFSGEANSSEGTSVAHSVSGLISYHSQDADEEFLEINDFFDLEDVGQNANCMTTEYMMSATNGMFDNLEYSDASSFLPGSFDTVGLVAENQYFDTDYSGIQNQGYQNTTEVRTYNQAALTVRSHMKHDHVVLSSHASGTLNIHAANELHNQSSTSSQSWFNAALSALLDSVPSSPALAAEIENTVINRTLQRISSFRPHQTAGEENTFINRTLQHISSFRSQQATGEEPGTPSIQVTRGGRLMFISLLVILASVIWTFTSGSALNFCKGLWKSSST

SEQ ID NO: 48 - protein, 388 aa, Zea mays
MEASAAAGGGRESNKKEEESLPPGFRFHPTDEELITYYLRRKIADGRFTARAIAEVDLNKSEPWDLPEKAKLGEKEWYFFSLRDRKYPTGVRTNRATNAGYWKTTGKDKEIYTAGHQLPAAATTPELVGMKKTLVFYKGRAPRGEKTNWVMHEYRLHSKSLPKSNKDEWVVCRVFAKSAAAKKYPSNNAHAHARSSHHHPYALDMFPPLLPTLLQHDPFVARRHHHHHPYMAPADLAELARFARGTPGLHPHIQPHPGTSSSAPYMNPAVAAPPFTLSGGGRLNLNLGATPAMPSSPPALHAMSMAMMSGQTEPSCASTGRQYHQVMAGEHHQQKQMATAAAAGLGGCVIVPGADGGFGADSAAGARYQGLDVEQLVERYWPAGGYQV

SEQ ID NO: 49 - protein, 409 aa, Zea mays
MEASAAAGGGRESNKKEEESLPPGFRFHPTDEELITYYLRRKIADGRFTARAIAEVDLNKSEPWDLPEKAKLGEKEWYFFSLRDRKYPTGVRTNRATNAGYWKTTGKDKEIYTAGHQLPAAATTPELVGMKKTLVFYKGRAPRGEKTNWVMHEYRLHSKSLPKSNKLEWIDKFMKMFFGYLYGTGAQDEWVVCRVFAKSAAAKKYPSNNAHAHARSSHHHPYALDMFPPLLPTLLQHDPFVARRHHHHHPYMAPADLAELARFARGTPGLHPHIQPHPGTSSSAPYMNPAVAAPPFTLSGGGRLNLNLGATPAMPSSPPALHAMSMAMMSGQTEPSCASTGRQYHQVMAGEHHQQKQMATAAAAGLGGCVIVPGADGGFGADSAAGARYQGLDVEQLVERYWPAGGYQV

SEQ ID NO: 50 - protein, 365 aa, Zea mays
MEQEPHRPMELPPGFRFHPTDEELITHYLARKAADARFAALAVAEADLNKCEPWDLPSLARMGEKEWYFFCLKDRKYPTGLRTNRATEAGYWKATGKDRDVFRGKALVGSKKTLVFYTGRAPRGEKSGWVMHEYRLHAKLHGHGHGHGQGAAVVVVPKAAGTKNEWVLCRVFKKSLVVGGAAAAAAPTAGKRGGTETSSNSKTGDVAAISHLPPLMDVSGSGSGAAAAAAAHVTCFSDALEGQFLDQTTTTPPPEAAAAATDDDGHLGALAAASSSAFQLPGFAHYYYGGGAPHLHQHHGAASLVQLLEGSVPPCNKGGERERERERLSASQDTGLTSDVNPEISSSSGQRFDHDHDHHLCCWGY

SEQ ID NO: 51 - protein, 365 aa, Zea mays; identical to SEQ ID NO: 50

SEQ ID NO: 52 - protein, 365 aa, Zea mays; identical to SEQ ID NO: 50

SEQ ID NO: 53 - protein, 165 aa, Zea mays
MEQEPHRPMELPPGFRFHPTDEELITHYLARKAADARFAALAVAEADLNKCEPWDLPSLARMGEKEWYFFCLKDRKYPTGLRTNRATEAGYWKATGKDRDVFRGKALVGSKKTLVFYTGRAPRGEKSGWVMHEYRLHAKLHGHGHGHGQGAAVVVVPKAAGTKVG

SEQ ID NO: 54 - protein, 373 aa, Zea mays
MVMANPDMLPPGFRFHPTDEELILHYLRNRAANAPCPVAIIADVDIYKFDPWDLPSRAAYGDKEWYFFSPRDRKYPNGIRPNRAAGSGYWKATGTDKPIHSSTTAGESVGVKKALVFYEGRPPKGTKTNWIMHEYRLAADAQAAHAYRPMKFRNASMRLDDWVLCRIYKKASCQVPAMAAVPQLSDHDQDEHCGFDDNPYAAMLLQGASYSYPAPPHAAAGAQRMPRIPSLTELFNDPSLAHFFEEGGGMQDMARLSNPQQQQQHAPLLGRAVTSQQLLLNNGHSMPGGGQAQMDPHPPAAAASTSSAAAGNNKRKRSSTTTDAGALSSSQASEAKKPNGSCFGATFQIGNGLQGSSLGHHHMPLHSNMGTMN

SEQ ID NO: 55 - protein, 295 aa, Zea mays
MSGAGPDLQLPPGFRFHPTDEELVMHYLCRRCAGLPIAVPIIAEIDLYKFDPWQLPRMALYGEKEWYFFSPRDRKYPNGSRPNRAAGAGYWKATGADKPVGTPKPLAIKKALVFYAGKAPKGEKTNWIMHEYRLADVDRSARKKNSLRLDDWVLCRIYNKKGGGLEKAAAPAAGGDHKPVFATAAVSSPPEQKPFVAAAGGLPPAFPELAAYYDRPSDSMPRLHADYSSCSEQVLSPEQLACDREVQSQPKISEWERTFASDPVNPAGSMLDPVVGHAGGDPLLQDILMYWGKPF

SEQ ID NO: 56 - protein, 84 aa, Zea mays
MSGAGPDLQLPPGFRFHPTDEELVMHYLCRRCAGLPIAVPIIAEIDLYKFDPWQLPSTSRRPRSSCSSSSSREPISCAAVTMAS

SEQ ID NO: 57 - protein, 202 aa, Zea mays
MSGAGPDLQLPPGFRFHPTDEELVMHYLCRRCAGLPIAVPIIAEIDLYKFDPWQLPRMALYGEKEWYFFSPRDRKYPNGSRPNRAAGAGYWKATGADKPVGTPKPLAIKKALVFYAGKAPKGEKTNWIMHEYRLADVDRSARKKNSLRVRTSAPPPSVRPLASSPSKSNKKNLAIMCRFRNERGDKRGPWFWAAEFFLRGPC

SEQ ID NO: 58 - protein, 84 aa, Zea mays; identical to SEQ ID NO: 56

SEQ ID NO: 59 - protein, 322 aa, Zea mays
MVELEPSVKSEHGGGVGLVLPPGFRFHPTDEEVITSYLLHKFLNPSFAPHAIGEVDLNKCEPWDLPSKAKMGENSKEWYFFCHKDMKYPTGTRANRATKEGYWKATGKDREIFKPAAGRDRDRELVGMRKTLVFYMGRAPRGTKTNWVMHEFRLEGKSRHTCNDLRFNPKDEWVVCKVHHKGAEEASAAKKSAGGGGEEHYYSTATPNVSSVEGGDEFLVDSLLDYSSYFNCFATGGLPLPSTTANSAAAPATNDDDSSWSMLRHAPADQQAMVGSYSLHHQAMKAKTVGGVTSPSFSAGLPSSPVADYVGNDASGYHTNNY

SEQ ID NO: 60 - protein, 302 aa, Zea mays
MGQPVTRRRERDAEAELDLPPGFRFHPTDDELVEHYLCRKAAGQRLPVPIIAEVDLYRFDPWDLPERALFGAREWYFFTPRDRKYPNGSRPNRAAGDGYWKATGADKPVAPRAAAADARTLGIKKALVFYAGKAPRGVKTDWIMHEYRLADAGRRAKKGSLRLDDWVLCRLYNKKNEWEKMRLGKGAAAGAVKEEEAMDMSTSHSQITHSWGETRTPESEIVDNDLPFPDPAMMVPKKERVDDGGSARTSDLFVDLSYDDIQGMYSGLDMLPPAGEDLYSSLFASPRVRGNQPTGPAGLGPF

SEQ ID NO: 61 - protein, 178 aa, Zea mays
MGQPVTRRRERDAEAELDLPPGFRFHPTDDELVEHYLCRKAAGQRLPVPIIAEVDLYRFDPWDLPERALFGAREWYFFTPRDRKYPNGSRPNRAAGDGYWKATGADKPVAPRAAAADARTLGIKKALVFYAGKAPRGVKTDWIMHEYRLADAGRRAKKGSLRVSFYTQKKERAERGIF

SEQ ID NO: 62 - protein, 362 aa, Zea mays
MNSMESCVPPGFRFHPTDEELVGYYLRKKVAAQKIDLHVIRDIDLYRIEPWDLQGHCGIGYEEQNEWYFFSYKDRKYPTGTRTNRATMAGFWKATGRDKAVHDKSRIIGMRKTLVFYKGRAPNGHKTDWIMHEYRLETDENAPPQEEGWVVCRAFKKRTAYPARMAWGDPSYAYREISAMGAAAAAFVDPNAASYAQIRRQQSNKSARFKQEAELDGGAAAALLQYSSSHLVELPQLESPSAPANKSQAASASDEVVDAADSGRRPGKKARADEVATDWRALDKFVASQLSPAAECGLEAAAASSTAAASNVGSQLDHVEDDDMAALLFLNSDGRDEAERWTGLLGPAAGDDGDFGLCVFDK

SEQ ID NO: 63 - protein, 362 aa, Zea mays; identical to SEQ ID NO: 62

SEQ ID NO: 64 - protein, 413 aa, Zea mays
MTGTTWIIDSQRFATKIKNASGSSDPSKQKWIGNPSKECPKCSHVIDNSDVVHQWPGLPKGVKFDPSDQELIWHLMAKHGKSGIKPHPFIDEFIPTVEEDEGICYTHPQKLPGVKQNGSVSHFFHRTFKAYNTGTRKRRRINTDDADVRWHKTGNTKPVLVDGKHLGCKKIMVLYISPLKGGKAEKTNWVIHQYHLGTGEDERDGEYVVSKIFFQQQFKPRDKNAQELTTSDDLESMAAESNLPDFTTLPTDKHVGTVQEVVHNPEHNLYQLNRNCEINIEETVVLPPSVKTTKDGDNLQSQDQKLWEGDSQFELLDSQQLAEGLALCDEFLLSQSQTSCGGGDEPRETKPCLAAYAHLSAEDFKKDLEECQRLEPTDNTNLELDNTDEFRLSQIEFSQDSFMTWAAEKITDD

SEQ ID NO: 65 - protein, 338 aa, Zea mays
MAKHGKSGIKPHPFIDEFIPTVEEDEGICYTHPQKLPGVKQNGSVSHFFHRTFKAYNTGTRKRRRINTDDADVRWHKTGNTKPVLVDGKHLGCKKIMVLYISPLKGGKAEKTNWVIHQYHLGTGEDERDGEYVVSKIFFQQQFKPRDKNAQELTTSDDLESMAAESNLPDFTTLPTDKHVGTVQEVVHNPEHNLYQLNRNCEINIEETVVLPPSVKTTKDGDNLQSQDQKLWEGDSQFELLDSQQLAEGLALCDEFLLSQSQTSCGGGDEPRETKPCLAAYAHLSAEDFKKDLEECQRLEPTDNTNLELDNTDEFRLSQIEFSQDSFMTWAAEKITDD

SEQ ID NO: 66 - protein, 380 aa, Zea mays
MTRAAASGRRRPSSSMGGASGGDQQPQQHGGADDADDGHLQQASGGDMVMPGFRFHPTEEELIDFYLRRRVEGKRFNIELINLVDLYRYDPWDLPALASIGDKEWYFYVPRDRKYRNGDRPNRVTPSGYWKATGADRTVYVEVKRPIGLKKTLVFYVGKAPKGLRSSWIMNEYRLPSGEADRYQKEISLCKVYKRPGIEDNFHLSTTTARSSGSKAAANMDKKHHRTSASPRLAPMFDGGHSSAHMNKPYGGANTAIAITSSAAARAVTMVPQTSMFLSTPSLSSTTSTEEDGTSLYLMKGANNSPMLHSSTHALLNANSATMATIPIDELSRAIGSYSSQGNPNHPLPSQGPLLPFPSMEKIWDWNPLLESPKVCTSFK

SEQ ID NO: 67 - protein, 433 aa, Zea mays
MPPQPLPPLLQSKPPCLLSQLTSLFHARLSLSLSLSLSLSLSLSLSLSLSLSLLICPEAAISSSDRGEAWSGRRLLVFGTAEMSEVSVINQAEVEDAGAGQLMDLPPGFRFHPTDEEIISHYLTHKALDHRFVSGVIGEVDLNRIEPWDLPGRAKMGEKEWYFFCHKDRKYPTGTRTNRATETGYWKATGKDKEIFRGRGVLVGMKKTLVFYRGRAPRGEKTGWVMHEFRLEGRLPQPLPRSAKDEWAVCKVFNKELQAARSEPLLAAAGAAELERVGSLGFLNELLDSAELPALVGADVDEVIDFKGPAPASVPDASYLPVKMEEHALLQMQQCQYQPPPPMFYPSQYFSLPAMNSGHLPPAIRRYCKAEQQVVSAQTASVISPSRETGLSTDPNAAGGYAEISSAATPSSSHQFLPELDDPALNLADLWKY

SEQ ID NO: 68 - protein, 319 aa, Zea mays
MTWCNGFNDVRAAVESSLSPAAAAVGKTAAASLAVLVKMCPSCGHRAQYEQKSTTIQDLPGLPAGVKFDPTDQELLEHLEGKARPDTRKLHPLVDEFIPTIDGENGICYTHPERLPGVSKDGLVRHFFHRPSRAYTTGTRKRRKVHSGDDGGETRWHKTGKTRPVLSNGRPRGYKKILVLYTNYGKQRKPEKTNWVMHQYHLGSDEEERDGELVVSKVFFQTHPRQCGYTMARESAVVVPAAAAVTGSSNAFIAGHHQSGGGGSVLREANGGADQLYSPGAMMGYDQEGPGNRAPPAPAVAPHFMPNFVVHAARASFGP

SEQ ID NO: 69 - protein, 318 aa, Zea mays
MTWCNGFNDVRAAVESSLSPAAAAVGKTAAASLAVLVKMCPSCGHRAQYEQSTTIQDLPGLPAGVKFDPTDQELLEHLEGKARPDTRKLHPLVDEFIPTIDGENGICYTHPERLPGVSKDGLVRHFFHRPSRAYTTGTRKRRKVHSGDDGGETRWHKTGKTRPVLSNGRPRGYKKILVLYTNYGKQRKPEKTNWVMHQYHLGSDEEERDGELVVSKVFFQTHPRQCGYTMARESAVVVPAAAAVTGSSNAFIAGHHQSGGGGSVLREANGGADQLYSPGAMMGYDQEGPGNRAPPAPAVAPHFMPNFVVHAARASFGP

SEQ ID NO: 70 - protein, 315 aa, Zea mays
MSRSDSPSPSPAAARRAQPSDATLVNAFLWPWVTLGITMPGGVHAVDLYSADPEKLARGYQPEVSLDGQCTWYFLSPLRPKSPHDPRKVRTVADGTGCWRSDSGVKNVIDCLDGARHVGYRQNFSFMRRDAAGADARSGWAMTEFHLHHSYDEHGHGGKVEGLVLCKMYRNRNRRIHGGSDDVVPGVSPCAEKTFSCGKSQPIGHDYSKAKNSDGGATATGTIAPPLLNSMVAGDDKVSGATTTTTAPPLGHKGNPVEMDNEDLLTWAPARKKMRAAGAGAESSEAASTVSNPTPDQVRCPRCGFHFTTMQSSRS

SEQ ID NO: 71 - protein, 399 aa, Zea mays
MARSWLITCRGIAKKIRYTNPGANHHISELVAEARRECPNCSYIIDNSDVAMQWPGLPAGVKFDPSELELLEHLEQKVGLGDSRPHVLIDEFIPTIDNDEGICYSHPENLPGMKTDGSNAHFFHRVSKAYGCGQRKRRRTINCSDHTVSDEHVRWHKTGRSKAIYENGVIKGWKKIMVLYKISQRGRKPDRANWVMHQYHLGEEEDEKDGELVVSKIFCQLPNKSMEISETETAYEEPGAPASVIGPKTPKTVTPQPRHPKNSPCETEQSIFILQDQLLLDGEDEPTMPIVSLADDAMNPAWCAVAEEEQVVGEASRAQSNSDEPLLCREDPNSLNDEALLPWDYPILSQCRSEIFDRNLNGYGLPDLHNVDLGTPPDLQLADFQFGSQESLGSWLDRI

SEQ ID NO: 72 - protein, 349 aa, Zea mays
MGMSSTQAAAQTQQQQQQLVPPGFRFHPTDEELVDYYLRKKVASRRIDLNVIKDVDLYKIEPWDLQDKCRLGGPGEEEQNEWYFFSHKDKKYPTGTRTNRATAAGFWKATGRDKPIYANKQRQLVGMRKTLVYYKGRAPNGHKSDWIMHEYRLETNENGPPQEEGWVVCRVFKKRLPTTRRESDHDAPCWYVDEDGTFMHDLNSPMGGLPPHHSIAQLHEQHLQMLNNSYKRRELKLQFQMPSHHILNAAAAIPHELEPPSFHSLLVSPDHHQAAKAHHRAVQLMDEHAADQVTDWRVLDKFVASQLSHDDAAKGVDYTDEGDILQINEKQATEYASTSTSSSQVDPWK

SEQ ID NO: 73 - protein, 366 aa, Zea mays
MHPGGGPLSVPPGFRFHPTDEELLYYYLRKKVSYEPIDLDVIREIDLNQLEPWDLKERCRIGTGHQNEWYFFSHKDKKYPTGTRTNRATTAGFWKATGRDKAIFLGNASRRIGLRKTLVFYIGRAPHGKKTDWIMHEYRLDQENVEIQEDGWVVCRVFKKKSYHQRGLNPAEMAAALDDDELQPFPVPIPGSSLQPTEHKTNPTHLMQYDYPSFDPSMQLPQLMSDDQEQEQPVRPTLLPGHPGVAMASMSSLNIECSQNLTKLTSNGSDEMLHVGHGGGAGGGVVVDRFAGTTTDWSILDKLLASHQNLDRLFHGKVVTTASASPMAVPVYHQQLMELGGSSSSLQRLPLQYLGGETADLLRYPK

SEQ ID NO: 74 - protein, 369 aa, Zea mays
MHPGGGPLSVPPGFRFHPTDEELLYYYLRKKVSYEPIDLDVIREIDLNQLEPWDLKERCRIGTGHQNEWYFFSHKDKKYPTGTRTNRATTAGFWKATGRDKAIFLGNASRRIGLRKTLVFYIGRAPHGKKTDWIMHEYRLDQENVEIQGLQEDGWVVCRVFKKKSYHQRGLNPAEMAAALDDDELQPFPVPIPGSSLQPTEHKTNPTHLMQYDYPSFDPSMQLPQLMSDDQEQEQPVRPTLLPGHPGVAMASMSSLNIECSQNLTKLTSNGSDEMLHVGHGGGAGGGVVVDRFAGTTTDWSILDKLLASHQNLDRLFHGKVVTTASASPMAVPVYHQQLMELGGSSSSLQRLPLQYLGGETADLLRYPK

SEQ ID NO: 75 - protein, 241 aa, Zea mays
MIKANPDSMLPPGFRFHPTDEELIVNYLRNRAANTPCPVAIIADVDIYKLDPWDLPSRAAYGDKEWYFFSPRDRKYPNGVRPNRAAGSGYWKATGTDKPIHGSATGGSVVGVKKALVFYKGRPPKGAKTNWIMHEYRLAAADAHAAHSYYRSMKSRNASMRLDDWVLCRIYKKASHVPPMAVPPLSDHEQDEPCGFDENPYGATTSAAVLLQGASCPALQAAAGVQRMPRIPSLTELFSDP

SEQ ID NO: 76 - protein, 293 aa, Zea mays
MGLREIESTLPPGFRFYPSDEELVCHYLYRKVANERSVQGTLVEVDLHAREPWELPDAAKLTASEWYFFSFRDRKYATGPRTNRATKTGYWKATGKDREVRDPAARAVVVGMRKTLVFYQGRAPSGVKSCWVMHEFRLDSPRTTTTPPKEDWVLCRVFQKRKVDGSEQDNGVSPSPPVFAGASQSQGVVLPPDQPCVVDAYVVVDQPGSSSVGLAPPQENLGSGLDALLTNGAMWQYTSSVFGHLLPQEATSSPPVMDLGSRGGEGGDYGCSFFYDSSFEDMANIGFRQGWMG

SEQ ID NO: 77 - protein, 295 aa, Zea mays
MEDDEQQQQQAAGACVPPGFRFHPTEEELVGYYLARKVACQKIHLDIVREVDLYRIEPWDLQERCGYYGGGQDQEEPTEYYFFSYKDRKYPSGTRTNRATAAGFWKATGRDKPVLSSSTAAVIGMRKTLVFYRGRAPNGRRTDWIIHEYRLQGNEHEHAQEEGWVVCRAFHKPMPNQHQHMMLRHAAGCYYPPPIFGYDDGPAQLMSGSGSPLAAESKLHVQQLLADMPPPLHSPAVDVVGVHHHSYNANDHAAAEPTTVDWNLLNSLLPPAQLNFHHPPSPASPSSCSKNNNGA

SEQ ID NO: 78 - protein, 277 aa, Zea mays
MHAAMADDEQQQAAAYACVPPGFRFHPTEEELVGYYLARKVASQKIDDLDIIREVDLYRIEPWDLQVQERCGYYGGGQDQEEPTEYYFFSYKDRKYPSGTRTNRATAAGFWKATGRDKPVLSSSSSGVVIGMRKTLVFYRGRAPNGRKTDWIIHEYRLQSNEHAPAQEEGWVVCRAFHKPMPNHHHHMIRHAAASCCYYYPAPAAAPPAAGLPPHNGHLHLHSPSAESAVDWNLLSSLLPPGQLDFVHHTLTPPPASSPSSCSTTTTTTTTRNNNNE

SEQ ID NO: 79 - protein, 230 aa, Zea mays
MSAERAPVLVRHGGGGVEALRQLPPGFRFRPTDEELVVQYLRRKAIGVPLPAAVIPVFRDLYSRDPWDVVAVSAPDTRSEGEKYFFAVRPASGGKSSGAGTGSRAAAGGRWKPSGKEKPVVLPRPCGGGSLLVGVKRAMTFVPRRRKKTAALPSAALKTGWVMHEYRLAAPLHKNGCSLAQAQGEWVVCRVFQKGGNRPRRRQREASPPPSASSSCVTDASSSDLDEVSS

SEQ ID NO: 80 - protein, 231 aa, Zea mays
MSAERAPVLVRHGGGGVEALRQLPPGFRFRPTDEELVVQYLRRKAIGVPLPAAVIPVFRDLYSRDPWDVVAVSAPADTRSEGEKYFFAVRPASGGKSSGAGTGSRAAAGGRWKPSGKEKPVVLPRPCGGGSLLVGVKRAMTFVPRRRKKTAALPSAALKTGWVMHEYRLAAPLHKNGCSLAQAQGEWVVCRVFQKGGNRPRRRQREASPPPSASSSCVTDASSSDLDEVSS

SEQ ID NO: 81 - protein, 202 aa, Zea mays
MDRPAQAPTQLPPGFRFHPTDEELVVLYLRRKALARPLPAAVIPVVHDVARLDPWDVTGASEGEGYFFSLRRAPATGRRRRAGSGYWKATGKEKPVFLQCGGEQRQLLVGVKTALAFHRREPPPPSSRTGWVMHEYRLAVPRGVADQRKKNARHGCVAEPGEWVVCRVFLKNRPNRDAGSKTLRHGASARRRRRQQQPEDVR

SEQ ID NO: 82 - protein, 157 aa, Zea mays
MDRPAQAPTQLPPGFRFHPTDEELVVLYLRRKALARPLPAAVIPVVHDVARLDPWDVTGASEGEGYFFSLRRAPATGRRRRAGSGYWKATGKEKPVFLQCGGEQRQLLVGVKTALAFHRREPPPPSSRTGWVMHEYRLAVPRGVADQRKKNARHLTS

SEQ ID NO: 83 - protein, 323 aa, Zea mays
MTWCNSFNDVRAVENNLATAAAVAAAAAKKQQQQQASSHVNLIRTCPSCGHRAQYEQVQAAATIQDLPGLPAGVKFDPTDQELLEHLEGKARPDARKLHHPLIDEFIPTIEGENGICYTHPERLPGVGKDGLIRHFFHRPSKAYTTGTRKRRKVHTDEQGGETRWHKTGKTRPVFTGGKLKGYKKILVLYTNYGKQRKPEKTNWVMHQYHLGSDEEEKDGELVVSKVFYQTQPRQCGSGSATAKDAIPLAANAATDHHHHHHHDGGNGGGNNMLKEAGIVDFYSPAALISYNQAASNSRVAASAHLVPNFEVHTTSGAAGFGP

SEQ ID NO: 84 - protein, 325 aa, Zea mays
MAVMAGAASMEVEQDLPGFRFHPTEEELLGFYLSRVVHGKQLHFDIIGSLNIYRYDPWDLPAMAKIGEREWYFFVPRDRKAGSGGRPNRTTERGFWKATGSDRAIRSSADAKRVIGLKKTLVFYQGRAPRGTKTDWVMNEYRLPDHSAAGRAAPPLPPKEDMVICKIYRKATPLKELEQRASAMEEMQRRIGGATATSLVQAAGSTGDDYLSSDDTYDTSFLQFPSSSSPAPSGDSYGAPAAAPREAKTEAADATTVTVASTSSSSSLLHAASVAGPAVRHGDLPTLQVPTHLGVADWTQMQDPFQLRSPWQDQLFFSPLAHLLY

SEQ ID NO: 85 - protein, 110 aa, Zea mays
MAKIGEREWYFFVPRDRKAGSGGRPNRTTERGFWKATGSDRAIRSSADAKRVIGLKKTLVFYQGRAPRGTKTDWVMNEYRLPDHSAAGRAAPPLPPKVIQRSSAPLHFCT

SEQ ID NO: 86 - protein, 172 aa, Zea mays
MAVMAGAASMEVEQDLPGFRFHPTEEELLGFYLSRVVHGKQLHFDIIGSLNIYRYDPWDLPAMAKIGEREWYFFVPRDRKAGSGGRPNRTTERGFWKATGSDRAIRSSADAKRVIGLKKTLVFYQGRAPRGTKTDWVMNEYRLPDHSAAGRAAPPLPPKVIQRSSAPLHFCT

SEQ ID NO: 87 - protein, 281 aa, Zea mays
MPKTPTAAPPPRTPRTPRAIHRELRLHARVPKPPAAIPPTANPARDSPRSPPARPRAENPSRHASGRERQRAPTAAIPGADKPVAPRAAAARTLGIKKALVFYAGKAPRGVKTDWIMHEYRLADAGRRAKKGSLRLDDWVLCRLYNKKNEWEKMRLGKGAVVGAAKEEEAMDMSTSHSQTHSWVETRTPESEIVDNDPPFPDLPAPAPAMMVPKKERVDDGGSARTSDLFVDLSYDDIQGMYSGLDMLPPAGEDLYSSLFASPRVRGNQPTGATGLGLGPF

SEQ ID NO: 88 - protein, 294 aa, Zea mays
MALREIESTLPPGFRFYPSDEELVCHYLHKKVANERIAQGTLVEVDLHAREPWELPEVAKLTATEWYFFSFRDRKYATGSRTNRATRTGYWKATGKDREVRSSSSATAVVVGMRKTLVFYRGRAPNGVKSGWVMHEFRLDTPHSPPREDWVLCRVFQKTKAADGDGDGGAQDGDSSSPPAAFTGPSRPRAVSEPPDHSAPPAGGGYYYGLAFGPRQVEVAQQQCYGGGGATVADHHHGFTRDSGGAAGFGATWGGGVAGGECGAGYLDMDGAFDVMMAGCFGGGDMDEFPQVWR

SEQ ID NO: 89 - protein, 182 aa, Zea mays
MRKTLVFYRGRAPNGVKSGWVMHEFRLDTPHSPPREDWVLCRVFQKTKAADGDGDGGAQDGDSSSPPAAFTGPSRPRAVSEPPDHSAPPAGGGYYYGLAFGPRQVEVAQQQCYGGGGATVADHHHGFTRDSGGAAGFGATWGGGVAGGECGAGYLDMDGAFDVMMAGCFGGGDMDEFPQVWR

SEQ ID NO: 90 - protein, 391 aa, Zea mays
MADQQQPQQQPQEMDVDRTGGLELPPGFRFHPSDFEIINDYLTKKVHDRDYSCIAIADADLNKTEPWDLPKVAKMGEKEWYFFYQKDRKYPTGLRANRATEAGYWKATGKDKEVYNPFAAEGLLLVGMKKTLVFYKGRAPRGDKTNWVMHEYRLEGSGRLPASPASASGSATNIAAAMMKASASACKDEWVVCRVFNKTTGIKKTAAPAYQVAMAGPEMDQNQNNIPAIPIPMPLQLPLPVPMQMQFPILPDFAMDPVAPYYPNPNAGAGMMPPMALAGMGGAGGLQINGALFGNPVPAPLPMNFYHHQMGMGAAAGQVDMGAAAGQMDMGAAGAGAGGFDVAAPESRPSSMVSQKDEQANAAEISSMMSVTGPGSATTTIEMDGIWKYKY

SEQ ID NO: 91 - protein, 391 aa, Zea mays; identical to SEQ ID NO: 90

SEQ ID NO: 92 - protein, 305 aa, Zea mays
MMAIKSLSMVEASLPPGFRFHPRDDELVLDYLAKKLGGGGGPVVVSIYGCPTMVDVDLNKCEPWDLPDIACIGGKEWYFYSLRDRKYATGQRTNRATDSGYWKATGKDRPISRKGLLVGMRKTLVFYQGRAPKGKKTEWVMHEFRMEGRDDPMKLPFKEDWVLCRVFYKSRATVAKPPTESSSFNIDAATTSLPPLIDNNFNISFDQPGSSSVQNLEGYEQVPCFSSNPSQQPSSSMNAARLPPSAAMADPEQQMGKSIIKDVLMSQFSRFEGSVKREAPPSNFSQDGFEYLAESGFTQMWNSFN

SEQ ID NO: 93 - protein, 517 aa, Zea mays
MEVLRDMHLPPGFGFHPSDIELVSHYLKRKILGQKIEYDLIPEVDIYKHEPWDLPAKCNLPIKDNKWHFFASRDRKYPTGSRSNRATLAGYWKSTGKDRAIKLNKLTLGTKKTLVFHEGRPPSGRRTEWIMHEYYIDENGCKVSPDMKDAFVLCRVTKRNDWSLDNDNEVGNRSSHLEQPDAATSVVSTVKPEDVAASVICPEESNHATTPIGSAELSNDVAQAAITPAAITPDSTTPNGGNELETWLQELLDPSPPFNLVADTGSADVCPTEQYAESSNLQNPGSMAPNIRPGHASPIQDGTDATDYLFTDDLPEDLYSMLYPGTDQFNDSIFLEQTGQEGNNNQTNYMMGIGSYVLPNNFENETPNAELQLDHENNKMDMSNENNDTGITIRRRRATAPPANISLAAGKIKMQVGIKRMVTSNSESINQTMKFTDNSGRRLDLRTDVEHQKKNANNVISAKQSDAANHEAHSNQGYLEGFKRCSSAGFRAYIFVALFVVGVAALVLHYHRSNANL

SEQ ID NO: 94 - protein, 308 aa, Zea mays
MAMVAAQGGGRRDAEAELNLPPGFRFHPTDEELVVHYLCRKVACQQLPVPIIAEVDLYKFDPWDLPEKALFGRKEWYFFTPRDRKYPNGSRPNRAAGRGYWKATGADKPIAPKGGGGAAGIKKALVFYSGKAPRGFKTDWIMHEYRLADADRAPGKKGSRKLDEWVLCRLYNKKNNWEKVKAEEPEAAAPFRHQQGAAEDSMSDSFQTHDSDIDNNAFGMQNGFGNMVHGQTMTMRNGIGSVARTVKEDNYWFTDLNLDDLQAPYNVTHVLNPNPVQTMNLAAGQGHGYLQSMSSPSTKMWQTILPPF

SEQ ID NO: 95 - protein, 379 aa, Zea mays
MSISVNGQSCVPPGFRFHPTEEELLNYYLRKKVASQQIDLDVIRDVDLNKLEPWDIQERCKIGSGPQNDWYFFSHKDKKYPTGTRTNRATAAGFWKATGRDKAIYSAVRRMGMRKTLVFYRGRAPHGHKSDWIMHEYRLDDPDAAAVAATVAAAAASSDGGQEDGWVVCRVFQKKHHHKESSGRCRSKRGSKTEHGHGEAKTAAHQRHGCGLQYSSNDDTLDHMLGRRSCKQEHELLPLPPPAAARAASRYIRPIETVLGGHGFMKLPPLESPAAAEALTTPHAVSAGDATAAGALDGLHRAGNGITDWVMMDRMVALHLNGQAPAADQLGSCFDASADGGGLACFYSAAANRLLGGGDDDLWSFTRSSSTERLGHVSL

SEQ ID NO: 96 - protein, 100 aa, Zea mays
MALIIGVSYRFCVHAERCKIGSGPQNDWYFFSHKDKKYPTGTRTNRATAAGFWKATGRDKAIYSAVRRMGMRKTLVFYRGRAPHGHKSDWIMHEYRLDDP

SEQ ID NO: 97 - protein, 326 aa, Zea mays
MAEQLDLPGFRFHPTEEELLEFYLKQVAHGRKLKFDIIPTVHLYRHDPWELPGLARIGEREWYFFVPRDGGRPAKQHHHQSSGARPSRTTERGFWKATGSDRAVRCAHDPKRLIGLKKTLVYYEGRAPRGTKTDWVMNEYRLPDACNNNNNNNNTVAGDSSAAAAASSTTTNNSPKEDIVLCKVYRKAVSLKELEQRVAMEELARATPSASHNAGSPADSMSSSDQDQQTQLGQGGVEIMITMPVGGISPPPPLPPPVMMSMKQEEEVAEPEAPLPAVLMRPSTLSLPQLEVAKQQQEWMQDPFLTQLRSPWMESWSPYYPSVLNF

SEQ ID NO: 98 - protein, 526 aa, Zea mays
MEAANRFTDHGASPSRAGSLENRIIGSAEVPRRFGYEALELRNGGSDYFGKGVLKVEEETGIKLNIEDMVDLMTLLDPATGGRMLPSLQDEWYDPAALAASSAWDVAKLRARFCVPSTPVEDTQCRDLHAGARLCVSCSLDDVNLKFYDVVLDSTKSLMDDIHEWGVLFDGRVGDRTITSRQWMKAAAGSGGERVAAVFSLAHKLQPAIIFIDEVDSFLGQRRTTDHEAMTNMKTEFMSLWDGFTTDRHLPKHRRLQPAINRRFGSLTSQNLDISQPNFEANPPDGVLAVPLLRHQSWPGLPRGVEFNPSDSDLLWHLAAEVGNALAERHPFINEFIKFVDDVREFICTHPQHIPGVRQDGRASYFFHRSFEPYINENDVNNCWKKIGSHISIILDGTLMGCKEVFALYADMPSDKRSQETDWRLHQYHLQNTVKAESEIVASKIFLASRNSLCELAKETHIESEWWKETVGDESREFGRYMRQREEQEKQEAELFTRAPVTKHDKQIEKRIRRQLHGEKIYSCSN

SEQ ID NO: 99 - protein, 672 aa, Zea mays
MVRGPVPTVGAGGTPYTPPTVLEEATPPSWVAGEELFRRGNLSSDSISGLAFALPHESGFPQTGLSRRVLRTGSSQGGDGGSLVGDRWRGRRRINDRRRGDWRGRVLRTGNPRRRGICHSRKDRCGARRGEGPSGGNGPCPPRRPKHSSSGRRDGGGSTKRRGPYPGREGRELGIHGRREDPGALAALGGVWSGGTEAGRAGARTWALLAGAARLLAALAWDRGRAGPGEQSGALAALPCARRGRGRVGPPKAGRGGQSGAPGRSGWVRPLAGAAAGAGGAPGRDDGSREGRWRLHREGRWNPWLDTMSQVVHQWPGLPKGVKFDPSDQELIWHLMAKHGKSGIKPHPFIDEFIPTVEEDEGICYTHPQKLPGVKQNGSVSHFFHRTFKAYNTGTRKRRRINTDDADVRWHKTGKTKPVLVDGKHLGCKKIMVLYISPLKGGKAEKTNWVIHQYHLGTGEDERDGEYVVSKLFFQQQFKPGDKNAQELTTSDDLESMAAESNLPDFTTLPTDKHVGTVQEVVHNPEHNLYQLNRNCEISIEETVVLPPSVKTTKDGDNLQSQDQKLWEGDSQFELLDSQQLAEGLALCDEFLLSQSQTSCGGGDEPRETKPCLAAYAHLSAEDFKKDLECQRLEPTDNTNLELDNTDEFRLSQIEFSQDSFMTWAAEKITDD

SEQ ID NO: 100 - protein, 300 aa, Zea mays
MVAMAAVQQQQQQQRRDAEAELNLPPGFRFHPTDEELVAHYLCARAAGRRPPVSIIAEVDLYRFDPWDLPERALFGRREWYFFTPRDRKYPNGSRPNRAAGSGYWKATGADKPVEHEGRTAGIKKALVFYHGKPPRGVKTEWIMHEYRLAEAGGARAKKSGAGTLRLDDWVLCRLYNKKNEWEKMQQQKEKEKKAMESEASLSHSHSDTRTPESEIDDDPFPELGSLPAFDDMGAAPAPAGVVLPKEEVEDFGDLGGDDWLAGINLDDLQMPGDAADFYGSMLVSPMAAKMEPDGGFPFF

SEQ ID NO: 101 - protein, 192 aa, Zea mays
MVAMAAVQQQQQQQRRDAEAELNLPPGFRFHPTDEELVAHYLCARAAGRRPPVSIIAEVDLYRFDPWDLPERALFGRREWYFFTPRDRKYPNGSRPNRAAGSGYWKATGADKPVEHEGRTAGIKKALVFYHGKPPRGVKTEWIMHEYRLAEAGGARAKKSGAGTLRVSGEHIASSLLLPWSLFPRRKEWPGC

SEQ ID NO: 102 - protein, 297 aa, Zea mays
MGLREIESTLPPGFRFYPSDEELVCHYLYKKVANERAAQGTLVEVDLHAREPWELPDAAKLTASEWYFFSFRDRKYATGSRTNRATKTGYWKATGKDREVRSPATRAVVAMRKTLVFYQGRAPNGVKSCWVMHEFRLDSPHTPPKEDWVLCRVFQKRKDSEQDNGGGSSSPPTFAGASSQGVVLDLPDDQQPSMTMAGAYVAVDHHQPGSSAVGFALPPHAQDNGLGDGGLDALLMNGATMWQYSSSALADHFPPEEVTAAPMMGLGSRGGGDGCSFFYDSGFDDMANMGFPQGWMG

SEQ ID NO: 103 - protein, 343 aa, Zea mays
MGTMTLPPGFRFHPTDDELVSYYLKRKVDNLKIELEVIPVVDLYKSEPWELPDKSFLPKRDLEWFFFCPRDRKYPNGSRTNRATATGYWKATGKDRRVACDGGVYGLRKTLVFYRGRAPGGERTDWVMHEYRLCQDLVHGACNFIGAYALCRVIKRHEAGLLLPPPASRAKAAGSARGHMMSEVSSGEQLSASSSPSPFTPANSSPTRPTLDAAGAVTCAMAPEPGNAFQLAHDASAALPSLALPPPPLLLPSPHEDDTFFVSEGLPAAAADWFGGDMGGVSESEQELKWDALFPCTGTFPSVGVDTWNAAAASPTTMLCRQASDGIDDLAAFFFSEDNRIVF

SEQ ID NO: 104 - protein, 259 aa, Zea mays
MEVKKEGAKATLPPGFRFRPTDEELIVHYLRRRALASPLPAAVDIPDVRILAHDPSDLLPPGFGEQERYFFTCKEAKYVKGRRANRATGAGYWKATGKEKPVAVAVRGVQGQGQGQGVLVGMKRSLVFYRGKPPTGSKTEWVMHEYRLAGAGLAPCRRRHADADGDGVARAPAEGWVLCRVFRKKGSAAVARRPGDRSDGEGDESAGGGGGCGGRGFIDFFARADAAGRRRRAPSPAVSSRWLADASPQPEQEATSRGP

SEQ ID NO: 105 - protein, 123 aa, Zea mays
MEVKKEGAKATLPPGFRFRPTDEELIVHYLRRRALASPLPAAVDIPDVRILAHDPSDLLPPECGCSKSRPWHRSSSRNASPPAAAAACHGGGGLLVLMFHRLLIAEKQVAGVVAGSRRKMAGV

SEQ ID NO: 106 - protein, 303 aa, Zea mays
MTGTTWIIDSQRFATKIKNASGSLDPSKQKWIGNPSKECPKCSHVIDNSDVVHQWPGLPKGVKFDPSDQELIWHLMAKHGKSGIKPHPFIDEFIPTVEEDEGICYTHPQKLPGVKQNGSVSHFFHRTFKAYNTGTRKRRRINTDDADVRWHKTGKTKPVLVDGKHLGCKKIMVLYISPLKGGKAEKTNWVIHQYHLGTGEDERDGEYVVSKLFFQQQFKPGDKNAQELTTSDDLESMAAESNLPDFTTLPTDKHVGTVQEVVHNPEHNLYQLNRNCEISIEETVVLPPSGKTTKDGYNLQSQD

SEQ ID NO: 107 - protein, 367 aa, Zea mays
MSISVNGQSVVPPGFRFHPTEEELLTYYLKKKVASERIDLDVIRDVDLNKLEPWDIQDKCRVGSSSGPQNDWYFFSHKDRKYPTGTRTNRATAAGFWKATGRDKAIYAAGGAARRIGMRKTLVFYQGRAPHGHKSDWIMHEYRLDAADADHHHPCCYPSPPPLPTAIVRGAAGPGDQVPQEQEGWVICRVFKKKNLVHHGAAQSSGGGGTAAAASKMESSPTSTTIIGDHASDDALDHILQYMGGGDTKPALLNHNQHLAAAADATTTTTAACPAAATSAGLYGNNKFMKLPPLEHAGGWLPPSPGPCEYGASGIADWDALDRLAAYELNGLSDASKNMAAFFDGDLWSMARSVSALHAADLAMNNA

SEQ ID NO: 108 - protein, 418 aa, Zea mays
MSISVNGQSCVPPGFRFHPTEEELLNYYLRKKVASQEIDLDVIRDVDLNKLEPWDIQEKCKIGSGPQNDWYFFSHKDKKYPTGTRTNRATAAGFWKATGRDKAIYNAVKRIGMRKTLVFYKGRAPHGQKSDWIMHEYRLDDPAAAAAAGSGDAVANDDAAATAAAAAAASSDGGQEDGWVVCRVFKKKHHHKESGGGGGNKHGSSNSEHGHGGAGKASAAAAAAAHQHQHHGGLQYSSSDEALDQILQYMGRSCKQEHELVSPAPAPPGRAAASRYLRPIETVLGGHAFMKLPALESPSAAASASLTQPAQHDELYRAAGNGITDWAMMDRLVASHLNGQQAPAAADQLGGGCGFDADAGAEDADAGLAFYSAAASRLLGSGGGAGSDDDLWSFTRSSVSSTAAAAATSTERLSHVSL

SEQ ID NO: 109 - protein, 185 aa, Zea mays
MSISVNGQSCVPPGFRFHPTEEELLNYYLRKKVASQEIDLDVIRDVDLNKLEPWDIQEKCKIGSGPQNDWYFFSHKDKKYPTGTRTNRATAAGFWKATGRDKAIYNAVKRIGMRKTLVFYKGRAPHGQKSDWIMHEYRLDDPAAAAAAGSGDAVANDDAAATVSKATTLIAVNLFSAPPVHVRHH

SEQ ID NO: 110 - protein, 225 aa, Zea mays
MGGGATNLPPGFHFFPSDEDLVVHFLRRKAANLPCRPDIVPTILLHRYDPWELNGTALQAGNQWYFFSSHAHAHAHSAAGQTRTSPSGYWNPAGADETVVLASSGRVVGLKKTLVFCTGEPFRGFRTNWVMHEYHLQDGPAGCNVGGSSGATTPSSSSSSGSSRRSQRKRVHSSTESINSWVICRVFESSCGSQVSFHDEGTELSCLDEVFLSLDDYDEVSLPNN

SEQ ID NO: 111 - protein, 362 aa, Zea mays
MEWRSATRVYIRATGLSRVKVEGLDLGAGRLVIGLPMAAFSSSNGVPPGFRFHPTDEELLLYYLKKKVGFEKFDLEVIREVDLNKIEPWDLQERCRIGSAPQNEWYFFSHKDRKYPTGSRTNRATTAGFWKATGRDKCIRTSYRKIGMRKTLVFYRGRAPHGQKSDWIMHEYRLEDADDAQGGTSEDGWVVCRVFKKKCFFKIGGGEGSTSQSADAGGHLAVSPPLGGHHDQQARAALAYMHPHPYYHHASSYYSQMHAPGPHAAAYSHHVQVQDLLTNHRPTDDGAGTSYDFSGLPVEHHPGGGLDVGTSDGVATDGGETTGTAAEQWQAMDGFSNGGSAAVQQMTGAQRGGEMDLWGYGR

SEQ ID NO: 112 - protein, 228 aa, Zea mays
MAAEGAPVLVRHAGGVEELRQLPPGFRFRPTDEELVVQYLRRKALGAPLPAAVIPVVRDLYSLDPWDAVDVPAAPDASSQGERYFFAVRPAGGVGSARRATASGRWRPAGKEKPVALPRPCGGGSLLVGVKRAMAFVPRRKKKKAAAAAALAIGWVMHEYRLAAPLHKHGCSLAQAQGEWVVCRVFQKGSGRPRRRRQRPVSPSPSSASSCVTDGSSSSSSDMDEVSS

SEQ ID NO: 113 - protein, 261 aa, Zea mays
MLAAWRSCGSSRRGSGSAPRTRSSWCSTSGARPWARRSPPPSSPSSATSTASTPGTPSTCRPPLVHTRSTTALRTTSSIHRFCQYSVVVGERTKIASFFLCFFPTIDPDASSQGERYFFAVRPAGGVGSARRATASGRWRPAGKEKPVALPRPCGGGSLLVGVKRAMAFVPRRKKKKAAAAAALAIGWVMHEYRLAAPLHKHGCSLAQAQGEWVVCRVFQKGSGRPRRRRQRPVSPSPSSASSCVTDGSSSSSSDMDEVSS

SEQ ID NO: 114 - protein, 386 aa, Zea mays
MDAIRSDDIEKQDEVMLPGFRFHPTDEELVRFYLKRKIQQKSLPIELIRQLDIYKYDPWDLPKLASTGEKEWYFYCPRDRKYRNSTRPNRVTGAGFWKATGTDRPIYSSDGSKCIGLKKSLVFYKGRAAKGVKTDWMMHEFRLPSLTDPTLLQKKPLEKTIPPNDSWAICRIFKKTNSTAQRALSHSWVSPPLSSTNENYIRLSSQATQRSYHSSENTSSTMTDIISSIQFTGSSYMPSIVSSCRNPLSIIDSSSRPAASLMLPSSGAEHHAMSILSAIPHDLPAGMDIASMVLNASPTTLQNLDRIPTNIEFGQPHHPSNSSMANRCTADLLDIGNSVTGAPRSINFPFNLQGALPDDWRMTLPWDSLPCTTEVSTNYKSTKYYT

SEQ ID NO: 115 - protein, 357 aa, Zea mays
MHPGVGPLSVPPGFRFHPTDEELLYYYLRKKVAYEPIDLDVIREIDLNKLEPWDLKERCKIGTGPQNEWYFFSHKDKKYPTGTRTNRATTAGFWKATGRDKAIFLGSARRIGLRKTLVFYIGRAPHGKKTEWIMHEYRLDEENVEIQEDGWVVCRVFKKKNYEQRGHNMAEMAALDDDELQPFTVPVVPAGTSSLPTTDHKNNPHLMQYDFPSFDPSMQLPQLMSADQPVPTLFPSHPGVATAMSSSIDVECSQNLLTMLTSNGSDGMLHVRAGGAGAGVDRFAGTTDWSILDKLLASHQNLDQLFHGKVTAASASPMAPYHQQLMELGGSSSSSSLQRLPLQYLSGETTDLLRFPK

SEQ ID NO: 116 - protein, 399 aa, Zea mays
MARSWLITCRGIAKKIRYANPSANRQISQLIAEARRECPNCSYVIDNSDVAMQWPGLPAGVKFDPSELELLQHLEQKVGLGDSRPHVLIDEFIPTIDNDEGICYSHPENLPGMKTDGSNAHFFHRVSKAYGYGQRKRRRIINCSDHTVPDDRVRWHKTGRSKAIYDNGVIKGWKKIMVLHKTLRSGGKRERAKWVMHQYHLGKEEDEKDGELVVSKIFFQLANKSMEISETETACEEPEAPASVIGPKTPKTITPQPRHPKSSPCETQQNISIVQDQLLLDSEGEPTMPIVSLEDDAMNPAWCAVAEERQVVGEASRAQSNSVETLLCREDPNSLNYEALLPWDYPILSQCRNEMLDGNLNGYGLPDHHNVDLGTPPDLQLADFQFGSQESLGSWLDRI

SEQ ID NO: 117 - protein, 348 aa, Zea mays
MQWPGLPAGVKFDPSELELLQHLEQKVGLGDSRPHVLIDEFIPTIDNDEGICYSHPENLPGMKTDGSNAHFFHRVSKAYGYGQRKRRRIINCSDHTVPDDRVRWHKTGRSKAIYDNGVIKGWKKIMVLHKTLRSGGKRERAKWVMHQYHLGKEEDEKDGELVVSKIFFQLANKSMEISETETACEEPEAPASVIGPKTPKTITPQPRHPKSSPCETQQNISIVQDQLLLDSEGEPTMPIVSLEDDAMNPAWCAVAEERQVVGEASRAQSNSVETLLCREDPNSLNYEALLPWDYPILSQCRNEMLDGNLNGYGLPDHHNVDLGTPPDLQLADFQFGSQESLGSWLDRI

SEQ ID NO: 118 - protein, 445 aa, Zea mays
MAQTSLPPGFRFHPTDVELVSYYLKRKIMGKKHIVDAIAEVDLYKFPPWDLCDKSSLRSKDLEWFFFCPRDKKYPNGSRTNRATPNGYWKTSGKDRIIMLNSRTVGMKKTLIFHEGKAPKGDRTDWVMYEYRMEDEDLVSAGFSKDAYVLCKIFKKSGLGPRIGEQYGAPFNEDEWDNAEVETSLFPLTCSEVNPTEGQRAQPTVLAGALLEPEPPLHNSSSTCAGEESSFGHATAEDLTFSHSVASSAIQDTPARMSGDGVVSVNNISNVANDMRSPRDCDEFLSELSRFMNDSPLRNTPLGECSGLPPMSEAEAHAFEVNSFGLYNELSELVGLGCADNNLNTSNVETTDYLMLPPDRELSANDYMELNDLLAPDPSFPSEFSAQDNQYMQHPLAQYNGHYDLSGPSEPTMPSIFDVFPPNNGVLATDDPANYLDPAMQFPFS

SEQ ID NO: 119 - protein, 445 aa, Zea mays; identical to SEQ ID NO: 118

SEQ ID NO: 120 - protein, 398 aa, Zea mays
MMTVDLGLQAAPPPSSSGGVPSSCTALPPGFRFHPTDEELIVHYLRKRAAAAPCPAPVIAEVDIYKFDPWDLPAKAVFGEAEWYFFSPRDRKYPNGVRPNRAAGSGYWKATGTDKPITLSSSSSSSAAAAAGMIGVKKALVFYRGRPPKGVKTSWIMHEYRLAEALHAVVNAYRPTRFKNNASSSMRLDDWVLCRIYKKTTPQLAYSMSPPPHEEVEASSTSFMDGGGGFDLSRLHPADDSASVSADDDIMALAAAAATSYYAARPLPRPASISDYLLDYSAVSELFEATPLTETTAQPGTATDAAGGFYYDFGNGGGEPAAAASVVAQQHQLSPLKRRSSVDEDNCNGGITDMLHASSSSSSKRVMGDHHSSSSSMAANSSVFEPGQTSSHQLHDRI

SEQ ID NO: 121 - protein, 438 aa, Zea mays
MDTSWIMNGLGFAEKIRSATRSLTLRFGELFARPRARCTNCDCDIDVSDVSLVWPALPAGVKFDPTDLELLQHLQGKSSLPNSVSHSLIDEFIPTIQEKEGICYTHPKNLPVRNAYDTGNRKRRRIVVATVGDDVSDGGGVAASGNSRWHKTGSSKPVFDEDGVRQGWKKILVLYRAPKKVGGKPESENWVMHQYHLGAREDETDGEFAVCKVFYQSPLRKNGRPAKTDAAAAAAAESDASVGKINPRTPMTTDPPRPRRLNSSPCNTEQYTPIQEDQGEEEEEEECGTSKMKAEPSECSACYAEASPTIPTSDEPMQATDDALDAGLDTPLPVDGPSMDLFHGLPDLDNAHPFTGLGTWISLDVSYLVCSLVAIDGRHGHERRAHGFVSSSAGHPRTTGWPRGLAGRIPLMRREEGSELAAAVEGASSVVNRRLVAL

SEQ ID NO: 122 - protein, 336 aa, Zea mays
MVAKVKRDGEVLVAAATGDSEEQDDLVLPGFRFHPTDEELVTFYLRRKVARKPLSMEIIKEMDIYKHDPWDLPKASTVGGEKEWYFFCLRGRKYRNSIRPNRVTGSGFWKATGIDRPIYPAAAGESVGLKKSLVYYRGSAGKGAKTDWMMHEFRLPPAASSPSTQEAVEVWTICRIFKRNIAYKKRQPAGSNAPPPPLAESSSNTGSFESGGGGDDGEYMNCLPVPVPATAAVVPRQQHRIGSMLNGGGVTASGSSFFREVGVHGQQFQGHWLNRFAAPEIERKPQLLGSSAMTIAFHQNDQTAATNECYKDGHWDEIARFMEVNDPTVLYDCRYA

SEQ ID NO: 123 - protein, 494 aa, Zea mays
MTVYICLFGFALQRSKQTGKQESSLPYILLLLLLNTHACALPPGAAYEPDMNREHSSSSSSKLINEKLEEHRISTAKHCPHCGEKIDSKPDWVGLPAGVKFDPTDQELIEHLEAKVKDEGSRSHPLIDEFIPTIDGEDGICYTHPEKLPGVTRDGLSKHFFHRPSKAYTTGTRKRRKIQTDCDVHKGETRWHKTGKTRPVMVSGRQKGCKKILVLYTNFGKHRKPEKTNWVMHQYHLGDLEEEKEGELVVCKIFYQTQPRQSSWSAASDRGAATAMVAATTAAAQEQHRRDSGSGSCSSRDHEAVSATSFPAGYTVTTAVEMQQHMKQPAADHFSFAPFRKTFDQEVGIGGDQVPSNQLGRSETHHAGRGQQPHGPVLATTAVPATAFLISRPSNPVSTIVPPAMQHASVVLDNDQFHVPAILLHHHDKFQPHQHQQEQTQQKLDRRSASAGLEELIMGCTSSTNTKGETSIAHPQETEWPYPYWPSDNQDHHG

SEQ ID NO: 124 - protein, 294 aa, Zea mays
MVSGRQKGCKKILVLYTNFGKHRKPEKTNWVMHQYHLGDLEEEKEGELVVCKIFYQTQPRQSSWSAASDRGAATAMVAATTAAAQEQHRRDSGSGSCSSRDHEAVSATSFPAGYTVTTAVEMQQHMKQPAADHFSFAPFRKTFDQEVGIGGDQVPSNQLGRSETHHAGRGQQPHGPVLATTAVPATAFLISRPSNPVSTIVPPAMQHASVVLDNDQFHVPAILLHHHDKFQPHQHQQEQTQQKLDRRSASAGLEELIMGCTSSTNTKGETSIAHPQETEWPYPYWPSDNQDHHG

SEQ ID NO: 125 - protein, 657 aa, Zea mays
MSLSPLDSSSPPAAAAAAATEVPLAPGFRFHPTDEELVSYYLRRRVLGRRLRVDAIAEIDLYRLEPWDLPSLSRIRSRDAQWYFFARLDRKVAGAGAGGRGGPGNRTNRATPRGYWKTTGKDREVHHRGKPVGMKKTLVFHAGRAPKGERTNWVMHEYRLLDADGPQDLHVVCRIFQKHGSGPQNGAQYGAPYMEEEWEEDDDAIENGSTHDASGQIAATTCAVDEESNEDDENAYCETNRPARVEPSHLPSVHEMLNPPEMAPLQGQDSKETSDGSCSDVAISLEEILQEPLSNISVENMHRLEGQNATDDNISVDNLLSAYPTKDNGYVGQYNTMNGSAPADEAHARWPLRTYSNQNYVNGPLADEFFDTGNDTNGVAYSRQQQADGFPAPRQVDESMVFYDAPSDYNLVDGKDDFVYLNDILNEPLGNESLFDGDDMMAYFDATENDFKYDILGSGQGLDYPLADMPLNFAQKSDKEDKFTFEGISEVPEANPQYGASSSGSHEDLYTDTEFLGVPTDDTADKTYGNRLASMLGSIPAPPAMASEFPPSTGKSAGMLSAVSSSSIRFTAGIIQLDGLTFSSGSGQWPLQKNGDLSLLVSFAVEGDVASKLPVGLGRATRISTVPMVLRSGFYLFFMSAMILLFSYKVGSCIYSR

SEQ ID NO: 126 - protein, 338 aa, Zea mays; identical to SEQ ID NO: 3

SEQ ID NO: 127 - protein, 354 aa, Zea mays
MDGAAAAATGSGGGHRVVGSRNEEHGKYLSESSCCPTDWLGLPAGVKFDPTDQELIEHLQAKVRPASAAAPSHPLIDEFIPTIEGEDGICYTHPERLPGLTKDGLSRHFFHRPSKAYTTGTRKRRKIQPPVADASSSSALPAQQQHQQQQRSETRWHKTGKTRPVVVAGRQRGCKKILVLYTNFGKNRKPDKTNWVMHQYHLGDKEEEREGELVVSKIFYQTQPRQCGVAAEPAATAASSDTVEEAADPPAPEGLVVPPPPDVAGAFQGAAGIDEFSFAQFRSSFEEEEDEQLHQQPQNFDGRRSTSGLEEVIMGCSSRRSKRAEASGPGGNKESRGWQYPSFWPSGSQQDHHG

SEQ ID NO: 128 - protein, 329 aa, Zea mays
MTHSPLAAIKPPRPFFQSHPSHTELVDSYLRTWVEDGVKTGAFIHDADVYGSDPADLLQQFAPVVAHNGERAWYFYSLLRYKHSSGKRKKRSTGSGTWHSEAKPKPVFMASKSNWHQIGLRQTFSFVVRNETGALFRTGWIMMEHRLLNDDGEEKQQEEEGFLVYRVLCKVYRSPRKPEPSGNKAAAAASPGHKIEADDDESNDATLDENDDDESNDATLDENDDGSNAAPPAASGRKRKSDDVEPSEAKASDVIAGGAAAAPAPKKKSDGSSSPVATSPTTEMQCPGCGHHVLVTMNRAEPKSQTEIAKDESAPGARQQGEIRMYEFL

SEQ ID NO: 129 - protein, 368 aa, Zea mays
MTQAAGRRRSMGGASGGDHPQQHGGGDDGHLQQGGGGDMVMPGFRFHPTEEELIDFYLRRRVEGKRFNIELINLVDLYRYDPWDLPALASIGDKEWYFYVPRDRKYRNGDRPNRVTPSGYWKATGADRTVYVEVKRPIGLKKTLVFYVGKAPKGLRSSWIMNEYRLPSGEADRYQKEISLCKVYKRPGIEDNFHLSTTTARSSGSKAAATMEKKHHRTSASPRMAPVFDGGHSSGYMNKPYSGANTTMLGMASSAAARAATLAPQTSMFLSTPSLSSTTSTEEDGTSLYHMKGVNPPMLPSSTHALLNANSATMATIPIDELSRAIGCQGDPNQTLPTQAPLLPFPNLEKIWDWNPLLESPKVCTSFK

SEQ ID NO: 130 - protein, 359 aa, Zea mays
MDCGGALQLPPGFRFHPTDDELVMYYLLRKCGGLPLAAPVIAEVDLYKFDPWQLPEKAFGGEKEWYFFSPRDRKYPNGSRPNRAAGTGYWKATGADKPVGSPRPVAIKKALVFYAGKPPKGVKTNWIMHEYRLADVDRSAAARKKTNNALRLDDWVLCRIYNKKGVIERYDTVDDDDGDGAVAEDVKPVPAPAASKNPRASARVGAAAAAPMKVELPEYGGGYYDYDDLETPSAGMLCFDRPSAPAPADRDSNNSVPWTTHHTHTDNSSSGSERVLSPSPDLPDRDHAESQPAAAAAAAGWWPVGGDWGSAAEDGFMVDVDVDDGSSLFGPLSPGLFARVDAAAFGFGDMLASYLHKPF

SEQ ID NO: 131 - protein, 89 aa, Zea mays
MDCGGALQLPPGFRFHPTDDELVMYYLLRKCGGLPLAAPVIAEVDLYKFDPWQLPAGMVIGGCREGVRWGEGVVLLLAARPQVPEWLQA

SEQ ID NO: 132 - protein, 174 aa, Zea mays
MDCGGALQLPPGFRFHPTDDELVMYYLLRKCGGLPLAAPVIAEVDLYKFDPWQLPEKAFGGEKEWYFFSPRDRKYPNGSRPNRAAGTGYWKATGADKPVGSPRPVAIKKALVFYAGKPPKGVKTNWIMHEYRLADVDRSAAARKKTNNALRVIHYTMTFLRRTYLSPRNTDTCS

SEQ ID NO: 133 - protein, 665 aa, Zea mays
MNHPSSSSSSAQPPPAPAVAAEATSLAPGFRFHPTDEELVSYYLKRKVLGRPLKVDAIADVDLYKLEPWDLPARSRLRSRDSQWYFFSRLDRKHANRARTNRATSGGYWKTTGKDREVRHGPRLVGMKKTLVFHAGRAPKGERTNWVMHEYRLEGDDAAGIPQDSFVVCRIFQKAGPGPQNGAQYGAPFVEEEWEEDDTDDGLLPVEGVAAADPEVPLASVEIPGALDRGYLQMSDLIQGLDDQNGNGTPSLPVSDTSNNSNHSEDVDGNSGDILSDPNLGSNFLQYAEPGEQNSLMLNGTIISNANAGDFFDNSSHSDGFLELKDFGDAANLDFPLGNGSSIWPLDCWAWKTPDSAESLNGTNDEIPPLPDDQTFQPDELEQLLQSIQEDSHLGSSIIDPPHSSMTNSVLPDEDCLMFYDAPFDSTMCDDGFAQNGILGSAATNLSGIGMVDDGMPYFDAMDGNLFNDILGSIQQPDGSSSHAFNGPVLTQEVNNTMFTYSPTQKVLEPNIVVGAPSSARLPEAGSQLNCVVLPDGQAKSSTIGKGFVRILDSISAPPAFAGEFPSNHRKSLARISGARPNTLHVSAEVIHIGSLAVPSGADKWALQKDQGMELLFSADFEPDARIHCGCNTITAVLRGGFCLFFVSAIMLLVSYEVGMCIYGK

SEQ ID NO: 134 - protein, 317 aa, Zea mays
MAMTAGAPSMEVEQDLPGFRFHPTEEELLGFYLSRVVHGKQLHFDIIGTLNIYRHDPWDLPAMAKIGEREWYFFVPRDRKAGSGGRPNRTTERGFWKATGSDRAIRSSADAKRVIGLRKTLVFYQGRAPRGTKTDWVMNEYRLPDHAAAAAPPPKEDMVLCKIYRKATPLKELEQRASTMEEMQRRSDAAEAASASLVQAVGSADDNYLSSGDTHDISVLQIPASSSPAPSGDSYGGPALREAQTEAADATTVTVASASLVHAACMAGPAARHGDLPTPQVPTHLGVADWTQMQDPFMLRSLWQDQLFFSPLAHLLY

SEQ ID NO: 135 - protein, 281 aa, Zea mays
MPKTPTAAPPPRRPRTPRAIHRELRLHARVPKPPAAIPPAANPARDSPRSPPARPRAENPSRHASGRERQRAPTAAIPGADKPVAPRAAAARTLGIKKALVFYAGKAPRGVKTDWIMHEYRLADAGRRAKKGSLRLDDWVLCRLYNKKNEWEKMRLGKGAVVGAAKEEEAMDMSTSHSQTHSWVETRTPESEIVDNDPPFPDSPAPAPAMMVPKKERVDDGGSARTSDLFVDLSYDDIQGMYSGLDMLPPAGEDLYSSLFASPRVRGNQPTGATGLGLGPF

SEQ ID NO: 136 - protein, 475 aa, Zea mays
MPRSGGGGNGGGISSSSRVMPNLPAGFRFHPTDEELMVHYLMRQAASMPCPVPIIAEVNIYQCNPWDLPAKALFGDKEWFFFSPRDRKYPNGARPNRAAGSGYWKATGTDKAILSSSTPTSHGGANIVVGVKKALVFYGGRPPKGTKTDWIMHEYRLSGAADDDCKGSTRRRVSSSSSSSMRLDDWVLCRIHKKSNDFQLSSSSEHEHEQEEPAAGGSATTVEELDALVVVDNSSSSDTTTTTITTNDNNSTETAATHHDPQTMMMLSKSCSLTDLLDSIDYAALSSQMLLLDAPHPHADDPPPHMVYYPPAASATHQQAIIANNTNSNDDYYDDDNLLPTAAATAVDAAAAAVLLSSSPADTNGVNKRKRVTAVDYYGAAEPPTFFHHHLDDGGNSFFSTTKKLKPPPPSDSRHGGHFGTATASSYRDSQQLVDSASSSGVFFHQYGYGYSSSNPFLNLNQQQQLLLNSHIGMQ

SEQ ID NO: 137 - protein, 259 aa, Zea mays
MEARPGAWRLQQRGPGAPVAGLPIGFRFRPTDEELLLHYLRRKALACPLPAGVIPDADLARLDPSDLLLPAAAPPAGGAADDASGEHFFFHRPATRCWRRGGGAARAAGAGVWRPSGKETVVVSPRCKRPVGTKRTLVFCPRRRGGGGARTDWVMHEYRLLPAGLHLHGCAANAPPPTNVSSHGGGAAAADWVVCRIFRRARPAHRARLGDAQEEEEEHAAVESASSTSSCVTDASGTIGQDDDGDEGISGSCSVASSN

SEQ ID NO: 138 - protein, 91 aa, Zea mays
MEARPGAWRLQQRGPGAPVAGLPIGFRFRPTDEELLLHYLRRKALACPLPAGVIPDADLARLDPSDLLLPAAAPRTPPIPTPTPAPSASFT

SEQ ID NO: 139 - protein, 425 aa, Zea mays
MSGDLDDGHGAAAVGNVVAAAAGGEAAAEVAVGAGAAAREAAVDAHDNDVVMPGFRFHPTEEELIEFYLRRKVEGKRFNVELIAFLDLYRFDPWELPAMAVMGGKEWFFYVPRDRKYRNGDRPNRVTASGYWKATGADRMIRGENSRPIGLKKTLVFYSGKAPKGVRSSWIMNEYRLPPPPTDADPFIPKSEISLCRVYKRSGIDDTHGQSSSSTQFASSARRTSSRTGAPTVIRHGSSPSPSSTPLSPTQQLSSFHLLQGECSSASPPAPMMDQVVTVHSAPQQLLTHPSPCTYAPATTISISTAEAVPEWAQGAEAAFASSYSLFNMAAAAGPMAAGSSRSSVDELSTLVGHSQAYANLSAATGGHLLPLLTPPPPPMLQTMPLGALPIVAPPSSSVADKLSWDWNQIPDTTGRDYNNTSGFK

SEQ ID NO: 140 - protein, 121 aa, Zea mays
MTWCNSFNDVRAVEDNLATAAAAKKQQLQASSHVNLIRTCPSCGHRAQYDEQVQQAAAIQDLPGLPAGVKFDPTDQELLEHLEGKARPDTRKLHPLVDEFIPTIEGENGICYTHPERLPGQ

SEQ ID NO: 141 - protein, 368 aa, Zea mays
MERLGVGVGVGELPPGFRFHPTDEELITYYLLCKAVDGGFCGGRAIAEIDLNKCEPWELPDKAKMGEKEWYFYCLRDRKYPTGLRTNRATAAGYWKATGKDREVRSGRSGALVGMKKTLVFYRGRAPRGQKTRWVMHEYRLDGTYAYHFLPGSTRDEWVIARVFQKPGEVPCGRKHRLGGPSAAAGESCFSDSTTSASIGGGGGGGASASSRPLLTVTDTSSPSLFVANANAAASNNNGNPVTGRELVPCFSTTASPLEAAALGVVGHPYNAAPLRLGLDFEAPSPGFVVPNLRSLQVQDDGGLPLFLSAAAGGGMSSATLGIMGSLGGSLHCPPHAGMDVVKVEGRAAPPQMAVGPGLLDGAFAWGF

SEQ ID NO: 142 - protein, 298 aa, Zea mays
MGLRDIELTLPPGFRFYPSDEELVCHYLHGKVANEQLAGAGAAMVEVDLHTHEPWELPDVAKLSTNDWYFFSFRDRKYATGQRANRATRSGYWKATGKDRAIHDPRSAIVVGMRKTLVFYRGRAPNGVKTSWVMHEFRMVEDPHAPPKEDWVLCRVFYKTKADDATADSEQDAVRMPRGGGGSADPSCYSPPPFPAALGGSHHHHHHLPPPPPSSDRRHGAGSPDDDFPGGMALLQHSSGMFDFHGGQPRPHDGVVLAGPAAAAAAPASRDGGDQCGSGALIDLGLDEHYTYNSLLQM

SEQ ID NO: 143 - protein, 74 aa, Zea mays
MGLRDIELTLPPGFRFYPSDEELVCHYLHGKVANEQLAGAGAAMVEVDLHTHEPWELPGTYSYSVPWQLIQLFA

SEQ ID NO: 144 - protein, 252 aa, Zea mays
MKKTLVFYTGRAPRGGKTGWVMHEYRLQGKHAAAATSSSLVVPSSVRAGASSKDEWVLCRVFKKSIEPPSVPGSKRSSSVACMGTEGTGVGVGPSSMSTEDDFAACAALPPLMDVSGGGANMSLSAAAAAAAASIELTPPAAPAPHVTCFSNAPLEGQFLNPPFLLPSAAAAADHIALAASASPFLASMMMQQQAQYAGDAGVVHGDGLLQGAGGWYGKLAGERERLSGGGVPAEISSTRHCMDHEASFWGF

SEQ ID NO: 145 - protein, 420 aa, Zea mays
MSRDLEDGHGAVGNVIAAAAAAGGEAVGAGEAGDAHDNDVVMPGFRFHPTEEELIEFYLRRKVEGKRFNVELIAFLDLYRFDPWELPAMAVMGGKEWFFYVPRDRKYRNGDRPNRVTASGYWKATGADRMIRGENNRPIGLKKTLVFYSGKAPKGVRSSWIMNEYRLPPPPTDADPLIPKSEISLCRVYKRSGIDDGHGQSSSSTQASSARRRISSRTGGVPTTAVQHGSTPSSMPLSPTPQQLSSFHPLQGECSSASPPEPIMDQVAVTVHRASPQLLPHRHRPRPCPYAPVMATVSAAEAAPQLAHAATAHASTYSLFNMAAAAAAPMAASSRSTIDELTTLVAPTQAYANLSAATTGGHLLPLLTPPPPPMLQMTPLGALPIVAPPLSSSVADKLSSWDWNPIPDTTDRDYNPSGFK

SEQ ID NO: 146 - protein, 392 aa, Zea mays
MEERNGTNMEKSDEILMPGFRFHPTDEELVSFYLKRKVQQKPISIELIRQLDIYKYDPWDLPKLASTGEKEWYFYCPRDRKYRNSVRPNRVTAAGFWKATGTDRPIYSSEGTKCVGLKKSLVFYKGRAARGMKTDWMMHEFRLPSLADPSLPKRPIDKTIPLNDSWTICRIFKKTSSLAQRALSHTWGPPLLGATEADDMINALQSVQASEFALESSLQVAPAAPAAGQFSSRHGLHVHGQHQQKKGTNSPSLDGSSSCKLINFTSSSPSEEGRPQSLSFPVTFPFEVQGTHKTAAAAPVFFGAHPDHHLGGFVVDSSADVNGGIVGGRSQDSSTRKPSNNGFSTSSGDWETAGRVSFPFDLGADSSEEWRCNIPWESLLTPAAVQAELLPH

SEQ ID NO: 147 - protein, 359 aa, Zea mays
MAADQQPQLQEEMNDAAGGGLRLPPGFRFHPSDFEIVSFYLTNKVLNTRFTCTAITEADLNKIEPWDLPSKAKMGEKEWYFFYQKDRKYPTGLRANRATEAGYWKATGKDKEVYNAAEGVAVLVGMKKTLVFYRGRAPRGDKTNWVMHEYRLEGSGRLPAGLASATGSAAANAAAALKASAYKQDEWVVCRVFHKTTGIKKTTAAPAYQVAMAGAEMDQNQNNFPGIPFPMPMQFPMLPDFSLDPVPPYYPNAAGAGMSMLPMAAGIGGGAGGFQLNGAALFGNPMAAPQPMSFYHQMGAAGTACAGGFDVSAPESRPSSMVSQKDDQANGAEISSMMSVAGPGPATTTTIEMDGVWKY

SEQ ID NO: 148 - protein, 358 aa, Zea mays
MAADQQPQLQEEMNDAAGGGLRLPPGFRFHPSDFEIVSFYLTNKVLNTRFTCTAITEADLNKIEPWDLPSKAKMGEKEWYFFYQKDRKYPTGLRANRATEAGYWKATGKDKEVYNAAEGVAVLVGMKKTLVFYRGRAPRGDKTNWVMHEYRLEGSGRLPAGLASATGSAAANAAAALKASAYKDEWVVCRVFHKTTGIKKTTAAPAYQVAMAGAEMDQNQNNFPGIPFPMPMQFPMLPDFSLDPVPPYYPNAAGAGMSMLPMAAGIGGGAGGFQLNGAALFGNPMAAPQPMSFYHQMGAAGTACAGGFDVSAPESRPSSMVSQKDDQANGAEISSMMSVAGPGPATTTTIEMDGVWKY

SEQ ID NO: 149 - protein, 192 aa, Zea mays
MAADQQPQLQEEMNDAAGGGLRLPPGFRFHPSDFEIVSFYLTNKVLNTRFTCTAITEADLNKIEPWDLPSKAKMGEKEWYFFYQKDRKYPTGLRANRATEAGYWKATGKDKEVYNAAEGVAVLVGMKKTLVFYRGRAPRGDKTNWVMHEYRLEGSGRLPAGLASATGSAAANAAAALKASAYKVRCVAVAVV

SEQ ID NO: 150 - protein, 160 aa, Zea mays
MHPSCSPLAVPPGFRFHPTDEELLYYYLRKKVAYEPIDLDVIREVDLNKLEPWDLKDRCRIGTAEPQDEWYFFSHKDRKYPTGTRTNRATTAGFWKATGRDKAIFLGNAGRRIGLRKTLVFYTGRAPHGKKTDWIMHEYRLNDDNVEVPPITVSTQRTTS

SEQ ID NO: 151 - protein, 317 aa, Zea mays
MSLISMMEARLPPGFRFHPRDDELVLDYLCRKLSGKGGGGAYGGIAMVDVDLNKCEPWDLPDEACVGGREWYFFSLHDRKYATGQRTNRATRTGYWKATGKDRPISVSGRRGAGDTAALVGMRKTLVFYQGRAPRGSKTEWVMHEFRVDGPPVADRPGSPLLQLQLQEDWVLCRVFYKSRTASTRPAAGPDEAGPLSSQLIGGLPMPRMAAPADAAYLSFDVTPAAGGYYHHQDSGPADARHHLPPPPAQPFSRSSLSSLRDLLSSMVEGSDAAAAVRETELHLQLEGWTEAAYAQQQGGAMPAHPQQTWSPFLSSG

SEQ ID NO: 152 - protein, 313 aa, Zea mays
MRAHGRPVSHPQLTLLVRLHTAARRPLRALHALSRFRHEFDVEVYKSHPSHLPERSALQTGDRQWFFFSRMDRKYPNGSLASRTTGDGYWKATGKDCFICGGVRAVGNRKTLVYHHGRARLEFWCFPLVGVPSQNTEAISYMITYGFAAVISTRVSNELGARNIANAKKALTVSLALSLMLGVAFLLLLGLGHDLLVRLFTTSEVVVSAFASMTPLLIGSVVLDSTQGVLCGVARGCGWQHLVAWTNLVAFYVIGLPLAILFGFTLGFQTKGLWMGQICGLLCQNCVLFFITLRTNWQELDLTMFNKDNDFVC

SEQ ID NO: 153 - protein, 419 aa, Zea mays
MDDDRADTNKPDEVLLPGFRFHPTDEELISFYLRRKIQQRPLSVELIRQLDIYKYDPWDLPKLSSSGEKEWYFYCPRDRKYRNSARPNRVTGAGFWKATGTDRPVYSSEGAKCIGLKKSLVFYKGRAAKGIKTDWMMHEYRLPSLGDPSRPNKTPKDKNIPADDAWAICRVFKKPNSVAQRVLSRSWGPASIATADPELLPALQSIQASRFALETSTCSANRFNSQQQQNLSSSQDGSSCKVITFNRSPYLPSEKDIHSSSVVILPLEIQSQQKSSDVTSALLSMAPGILSSANEAIPNTEFGLLGPSNGYPIDWATDTSGGIVNSDDDPYKRKSGNGYSSGYECGIPRKIKFPFNLGNDMMFLMVHGGEVIIDGGTKSSMGGGRRAWNSSQQIWSDIAPYDLDGRLIESRWLEDVNSL

SEQ ID NO: 154 - protein, 234 aa, Zea mays
MSEVSVINQAEVEDAGAGQLDLPPGFRFHPTDEEIISHYLAHKALNHRFVSGVIGEVDLNKCEPWDLPGRAKMGEKEWYFFCHKDRKYPTGTRTNRATETGYWKATGKDKEIFRGRGVLVGMKKTLVFYRGRAPRGEKTGWVMHEFRLEGKLPERLPRSAKVRPSPPVLASFNCSFGPGNLFLPPPPPPPPFFVRRWPKSSSFLAAFVCLFVACRTSGPCARCSTRSWRRGPSQ

SEQ ID NO: 155 - protein, 348 aa, Zea mays
MSEVSVINQAEVEDAGAGQLDLPPGFRFHPTDEEIISHYLAHKALNHRFVSGVIGEVDLNKCEPWDLPGRAKMGEKEWYFFCHKDRKYPTGTRTNRATETGYWKATGKDKEIFRGRGVLVGMKKTLVFYRGRAPRGEKTGWVMHEFRLEGKLPERLPRSAKDEWAVCKVFNKELAARTEPIMAAAGAGELERVGSLGFLSELLDSAELPALIGADVDEVIDFNGPASTSGAPGTSHSHLPVKMEEHALLHMQYQPPPPPTSYYSSQYFSLPAMNSGDVLPPAIRRYCKAEQQVVSGQTAASEVSPSRETGLSADPNAEISSAVTPSSSHQFLPEFDDPVLNLADLWKY

SEQ ID NO: 156 - protein, 303 aa, Zea mays
MVMAPAAAQQQRRRDAEAELNLPPGFRFHPTDEELVAHYLCARAAGRRPPVSIIAEVDLYRFDPWDLPERALFGRREWYFFTPRDRKYPNGSRPNRAAGSGYWKATGADKPVEHGGRTVGVKKALVFYHGKPPRGVKTEWIMHEYRLADAGARARARKPGTGTLRLDDWVLCRLYNKKNEWEKTQQQQEKKQNQKQMESEASLSHSHSDTRTPESEIDDDPFPELASLPALDDMMGPAAAAPAGAILPKEEVEDLGGLGGDDWLAGINLDDLQIPGEADFYGSMLVSPMAAKMEQDAAGFPFF

SEQ ID NO: 157 - protein, 186 aa, Zea mays
MVMAPAAAQQQRRRDAEAELNLPPGFRFHPTDEELVAHYLCARAAGRRPPVSIIAEVDLYRFDPWDLPERALFGRREWYFFTPRDRKYPNGSRPNRAAGSGYWKATGADKPVEHGGRTVGVKKALVFYHGKPPRGVKTEWIMHEYRLADAGARARARKPGTGTLRVSGEHLAVSRRIFFLGFISSL

SEQ ID NO: 158 - protein, 368 aa, Zea mays
MVVKEFGREVVMSMDKVKRGGEALMAAGAGAGDEEKDDAVLPGFRFHPTDEELVTFYLRRKVARKPLSMEIIKEMDIYKHDPWDLPKASTAAGGEKEWYFFCLRGRKYRNSIRPNRVTGSGFWKATGIDRHIYPATANPVESVSVGLKKSLVYYRGSAGKGTKTDWMMHEFRLPPAAASPSPTPTSMQEAEVWTICRIFKRNIAYKRQPQLPAWRQQQQSSSNTGSFESDGGGGGDEYMNRCLPVPATATATAHQIGGMLNGGGVVSATGSSSSSFFRDRESVHGGQQFHFHEQWLSRFPAAPAVEQKPQLLDPSAMAIAFHQNDDQSVATAAAAAASECCKDGYYWDEIARFMEVNDPTVLHDCRYA

SEQ ID NO: 159 - protein, 312 aa, Zea mays
MVATTRSKTRLGLGSRLQHNMETHPSEAELITSFLRPRVVVSDDSDTPCASFVHDVDVYSAGPGELTGRLAPVLASNGDRAWYFFCAVRAKKSDGQRKARKVHTGEGCWHSEAGAKPVVEGPGRLLVGHRQAFSFMTKVKGRRVRSGWLMVELSLDGADADDVVLCKVYFSPRARASPAAASGRKERKAAADDKNPASSARRRRDPPADDAEAGTPTPDNDEDRDSAQSRGLADDDNSSTTVADDPDAVGLGTDDSAFSWWMRNRDRLMEKYKIVDRPDEELQKTLDLDEYLRLLSRDLDPADALPRATSYM

SEQ ID NO: 160 - protein, 356 aa, Zea mays
MARPPSAALKPPYPAFQSHPSDLELVNFYLRPWVETGVKTGAFIHDADVYAADPNYLTRQFAPAVAQDGERAWYFYTPLRHKSVHGTRKTRTVATGGGCWHNEAKARPVYMVSNGMHQIAHRQSFSFVEKDGGVRVRTGWLMMELRLVEDGAAGQKPEEDGALGSRVLCKVYRSPRNPEPSGIEAATAPGQKAEADDDESCDDESSDATLDDDDSSNASLAAASGPKRESDEVESSDATVAAPSRHSAPNDEISGGSAVAPGRKEKTEIGEVSTETSAAVRKRRKADGSSSPSTPVSTTDMHCPQCGTHLMLTLNMAESKSEAGLAKDESATAAPDQGGTGESSQKNVRVRFHQFL

SEQ ID NO: 161 - protein, 612 aa, Zea mays
MQPPPQLPAALPVGFRFRPTDEELVLHYLKPKIAGRAHADLLLIPDVDLSACEPWELPAKALIRSDDPEWFFFAPLDRKYPGGHRSNRSTAAGYWKATGKDRLIRSRPAGTLIGVKKTLVFHRGRAPRGHRTAWIMHEYRTAEPQLPQGQNGSFVLYRLFNKNEEESEASDAADSPSTSSPPIAPEVKTENLSQPTSAKMSPHIATVSSNEPTSNQQGDVNLLDVLTQLPDLHPEQAFDGFPTITSPMRPYTDHPFFGNAGDQDLSAYIDSIISHQDLEGLLASPSLADMVEQATVNVEPHPINVPVLDNSSNSNRLAENSRGKVGSETLLLIKGTDGTGAAACSSSATKILQDNTDDHTGAQSNLASSASAQVSHFYNQYELQSAFVPEMEPPNSGTLCSAASPTPHPQHLFNGVVASDVFNGIQGWPAEPLTDPHQGNAPRRIRLAHSIQRASVTEPVLTSDVEDEDEPGICYSADSSSASNTEDYANVFSQTMAGETMRIQRGGVISTQVVSSTEKLQDFTFDEGTLLHGELHHGGNLRQRRTEETRQDVRDGMQHSVHVTRVAVPSLRRKGEAAQIGSVVRLLLLVLLLVVIFVFVGLWKCSSFRLLH

SEQ ID NO: 162 - protein, 611 aa, Zea mays
MQPPPQLPAALPVGFRFRPTDEELVLHYLKPKIAGRAHADLLLIPDVDLSACEPWELPAKALIRSDDPEWFFFAPLDRKYPGGHRSNRSTAAGYWKATGKDRLIRSRPAGTLIGVKKTLVFHRGRAPRGHRTAWIMHEYRTAEPQLPQGQNGSFVLYRLFNKNEEESEASDAADSPSTSSPPIAPEVKTENLSQPTSAKMSPHIATVSSNEPTSNQGDVNLLDVLTQLPDLHPEQAFDGFPTITSPMRPYTDHPFFGNAGDQDLSAYIDSIISHQDLEGLLASPSLADMVEQATVNVEPHPINVPVLDNSSNSNRLAENSRGKVGSETLLLIKGTDGTGAAACSSSATKILQDNTDDHTGAQSNLASSASAQVSHFYNQYELQSAFVPEMEPPNSGTLCSAASPTPHPQHLFNGVVASDVFNGIQGWPAEPLTDPHQGNAPRRIRLAHSIQRASVTEPVLTSDVEDEDEPGICYSADSSSASNTEDYANVFSQTMAGETMRIQRGGVISTQVVSSTEKLQDFTFDEGTLLHGELHHGGNLRQRRTEETRQDVRDGMQHSVHVTRVAVPSLRRKGEAAQIGSVVRLLLLVLLLVVIFVFVGLWKCSSFRLLH

SEQ ID NO: 163 - protein, 436 aa, Zea mays
MNRAHSSSSKLINEKLVEHRISTAKHCPHCGEKIDSKPDWVGLPAGVKFDPTDQELIEHLEAKVKDEGSRSHPLIDEFIPTIDGEDGICYTHPEKLPGVTRDGLSKHFFHRPSKAYTTGTRKRRKIQTECDVHKGETRWHKTGKTRPVMVNGRQKGCKKILVLYTNFGKHRKPEKTNWVMHQYHLGDLEEEKEGELVVCKIFYQTQPRQCSWSSDRGAAATALAATAAAAAAQEQHRRDSGSGSCSSRDHEVSATSFPAGYTVTTAVEMQQHMKQPADHFSFAPFRKTFDQEVGIGGDQVPSNQLGRSEPHHAGLGQQPHGPVLATKTAVPATAFLISRPSNPVSTIVPPAMQHASVVLDHDQFHVPAILLHHHDKFQNMHQQPQQKLDRRSAGLEELIMGCTSSTSTKGDASIAHPQETEWPYTYWPPDNQDHHG

SEQ ID NO: 164 - protein, 436 aa, Zea mays; identical to SEQ ID NO: 163

SEQ ID NO: 165 - protein, 436 aa, Zea mays; identical to SEQ ID NO: 163

SEQ ID NO: 166 - protein, 282 aa, Zea mays
MSSSISMMEARMPPGFRFHPRDDELVMDYLLQKLSGHGHHAGAAIVVDVDLNKCEPWDLPDSACVGGKEWYFFSLRDRKYATGQRTNRATHSGYWKATGKDRAVVAGGEVAVGMRKTLVFYRGRAPRGKKTEWVMHEFRLHPHAAPCLLAAAAPNKEDWVLCRVFYKSRTTSPRPESEDARDGTPSAEPQLPAALPLAPLADTYAAPTVAEQVYCFSGLPALPFRRPVSLGDLLEFDASEKESVTTAMTSVSNNTSSVLELAPNCNWNQENGMSRMWSPLGI

SEQ ID NO: 167 - protein, 518 aa, Zea mays
MEVLRDMHLPPGFGFHPSDTELVSHYLKRKILGQKIEYDPIPEVDIYKHEPWDLPAKCNLPIEDNKWHFFASRDRKYPTGSRSNRATLAGYWKSTGKDRAIKLKKRTLGTKKTLVFHEGRPPSGRRTEWIMHEYYIDENECKVSPDMKDAFVLCRVTKRSDWELDNEVGNRYPHLEQLDAAAASVASTVKPEDAVATVICPEESNRAATPVGSDELSNDVGQEPITPDSSPPNGGKELEVWLEELLDPSPSFNLVADTRSADVSLTDQYAESSNLQNPGSVSRNIGPGHASPIQDGTDATDYLLTDDLPEDLYSMLYPGTDQFYDSMFLEQAGQEGIAFPTNQAYYMMGMESYALPTNLNGTLNAELQSDQENNTTNLANGNTDTGVTIQSRRATTSPANISLAAGKIKMQVGINRMVTSSSVSINQTMRFTDNSGRRLDLKTDDVEHQKKTTNSAISAKQSRAANPEGHSSQGYLKGFKNTFRCSSAGFKAYISFAFFVVGVAAAAVLHHHRSCANL

SEQ ID NO: 168 - protein, 435 aa, Zea mays
MSISVNGQSVVPPGFRFHPTEEELLTYYLKKKVASERIDLDVIRDVDLNKLEPWDIQEKCRIGSGPQNDWYFFSHKDKKYPTGTRTNRATAAGFWKATGRDKAIYASPGARRIGMRKTLVFYKGRAPHGQKSDWIMHEYRLEAPVDAGAGAAHHLLLPAAEHPPYYTSPPQAPSSTTTATIRGAAGDQAAQEQEGWVICRVFKKKNLVHHGQSSGVKQQAAGDDHAASHTAAAAAHMDESSPSQCSSVTVISDHVHANVNDKQQQAQASLLMMHTHHSASSDDDALDHILQQYMGGGRQAPAPDTKPALLEQLDHLHHHLAAAPTTRAAAGFYYGKFMKLPPLEHAGLPPSPPPPGAREYGAAAAAGWDDDDDALDRLAAYDHLNGLSNDASKNMAAFFDVEPSAAAAAAVDGDLWSLARSVSALHADLTMNNNV

SEQ ID NO: 169 - protein, 283 aa, Zea mays
MAEPAPGFRFYPTEEELICFYLRNKLSGTRRGDDIERVIPVADLTTTMALRHTTHAYADEAHRGAYSGDEEPWFYFCPRQEREARGGRPSRTTPSGYWKAAGTPGLVYAADGRPIGTKKTMVFYCGRAPGGTKTKWKLNEYKAFQYEDDDEVAVVAAPAPPTTPSHALQTRSEYSLCRLYTKSGSPRQFDRRPSSSAAVVAAGGGGSEHPARPPSAAALPDGEQTRQRRKRAAPPSDDDTSSSSYDDGSTQQQQLLLADRGTDNDGIVEDMADWSEFLDGWII

SEQ ID NO: 170 - protein, 687 aa, Zea mays
MAPVSLPPGFRFHPTDEELIICYLKRKINGRQIELEIIPEVDLYKCEPWDLPEKSFLPSKDLEWYFFSPRDRKYPNGSRTNRATKSGYWKATGKDRKVNSHRRAVGMKKTLVYYRGRAPHGSRTDWVMHEYRLDERECETDTGLQDAYALCRVFKKTAPGPKIIEHYGAVHHPIEQTQWMGSSVERSPTLDLSSDVRGDDFDSSSFSFPTEAPMDSSMHGGLFGMQMSAPHEDAKWMQFLSEDAFNATNPFFTNPASSSFSCLPSKVDVALECARLQHRLSLPPLEVEDFPHDVSLDTKASVLRSSNPNNEVDILQEFLSVASASQELINGTSSSYAAEMWAGAGTSSTSDTHYVNELSSLFEFGVKAKEEADNFYHMDCIGTSSGFSPKPVRVDEPVRLVEIADMEEFKEEKRRVENLRGVRLHNNDDLGEIPTDCCITQYPISDTADISGEAGHLTNPTSAGGLDTAPIFSQSQPDDFAIGFSDDADPNASFDLCERVDVKHGLFVSTVGAPKTFFHHVEPSKKVSFHLNNNPVASDDDVSKATTGKSRSPIISVMTTKDSGSSFSVFSKLKALIRDKFLVKKLPSSCQRSLLGSKETAAVSELLQMVVSSLLLTPTEVTGPTTEQEKLARKAMKPGPRRCDGSHAWLLPLPKRSKGISSMFFSGKWAFLTSALAIRAPGPGCNH

SEQ ID NO: 171 - protein, 408 aa, Zea mays
MAKTSLPPGFRFHPTDVELTVYYLKRKLLGKHLRCNAITEIDLYKFAPWDLPERASLESNDLVWYFFCPRDRKYSSGLRTNRSTGVGYWKATGKDRPVVYNSRTVGMKRTLVFHLGKPPRGDRTDWVMYEYRLEDEEIAASGVKLDACVLCKIFQKSGPGPKIGAQYGAPFNEEDWNDASNVECSPCVPSVAPCAPESSRGGLNSAGQRLAVSYDVKVSLGSSAEGINRPAVNGVHPVRPSPDAPNDCIHIQLLAEVMRCSSTSMHVLRTAGDDGLLADSTADYSSDNRISLDAIETIFCEVDELGPQAMVNNTNHCDSCGEYLIHPTMVARGAEQYLELNDLSFSLTDGPDSCGVLFSNGVSVEQLPDLELRFEQFSPDHISNTAIASTSTTVGSSASVPLLEDHRT

SEQ ID NO: 172 - protein, 408 aa, Zea mays; identical to SEQ ID NO: 171

SEQ ID NO: 173 - protein, 168 aa, Zea mays
MAKTSLPPGFRFHPTDVELTVYYLKRKLLGKHLRCNAITEIDLYKFAPWDLPERASLESNDLVWYFFCPRDRKYSSGLRTNRSTGVGYWKATGKDRPVVYNSRTVGMKRTLVFHLGKPPRGDRTDWVMYEYRLEDEEIAASGVKLADYSDLAVCSSYIEAWKLTKPSK

SEQ ID NO: 174 - protein, 344 aa, Zea mays
MDAFTHVPPGFRFHPTDEELVDYYLRKKVALKKIDLDVIKDVDLYKIEPWDLQEKCRIGSEEQNEWYFFSHKDKKYPTGTRTNRATTAGFWKATGRDKPIYVKNCLVGMRKTLVFYKGRAPNGQKSDWIMHEYRLETNNNGIPHEEGWVVCRVFRKRLATVQRMAGDSPYWFNDHAGFMAPELGSPRQAAHHQQNVMMYHRQQSSYSYPCKVELEYHHLLPQEHFLQQLPQLESPKLPDLIGQVDTTLQPACGLTQEHGAPRYTLQELQAEPLYLATGGDTDWRALDKFMASQLSHGDITPNKDSANNYSNPALQVIQQSEEKEEALDYVSTSASCGGDNDLWK

SEQ ID NO: 175 - protein, 170 aa, Zea mays
MDAFTHVPPGFRFHPTDEELVDYYLRKKVALKKIDLDVIKDVDLYKIEPWDLQEKCRIGSEEQNEWYFFSHKDKKYPTGTRTNRATTAGFWKATGRDKPIYVKNCLVGMRKTLVFYKGRAPNGQKSDWIMHEYRLETNNNGIPHVSCTDPLEYMHYPCQRPTRPLVIPPV

SEQ ID NO: 176 - protein, 75 aa, Zea mays
MERPAQAPTQLPPGFRFHPTDEELVVLYLRRKALARPLPAAVIPVVHDVAGLDPWDLPGACARALHLSASTFGSA

SEQ ID NO: 177 - protein, 285 aa, Zea mays
MERPAQAPTQLPPGFRFHPTDEELVVLYLRRKALARPLPAAVIPVVHDVAGLDPWDLPGASEGEGYFFSLRRAPATGRGSRRRRAGSGYWKATGKEEPVFLQCGGGGVGGKRQLLVGGKTALAFHRSEPSPPSSSRTGWVMHEYRLAAASRGVAEQRKKNASHGCCDAEPGEWVVCRVFLKKGARRSRPGRDGNHSRALRHRASAAPPQLREGVGGRQPLLFPAPQSPSSSCVTGVTDLSDEEDEVSSGSITRVCTSERGLMGILSVPSPLSHGPVAQPFSGTIQ

SEQ ID NO: 178 - protein, 359 aa, Zea mays
MCLTILTHCVAAWTCMVGYSGSDKATFGEQEWYFFSPRDRKYPNGARPNRAATSGYWKATGTDKPIMASGGNREKVGVKKALVFYRGKPPKGLKTNWIMHEYRLADAASSTTSRPPPPCNAGGKATSLRLDDWVLCRIYKKIDKLGVGDPPRIMECGEDSVENAVAAYPTHAAAAAMAVAVAGGGGAYHTGNYTSLIHHHHEDSFLVDGLLTAEDAGGSSLSQLAAAARAAAPTDTTKQLLVPSSTTPFNWLDASALTILPPAKRFHGYNRDTTDGGGTSLPSPSERNNLQAAVGAVDSGASGGTSAVIPSFLNPLGVQGATSYHHHAIFGTPVTPEAAAAAACSFQHPYQLSGVNWNP

SEQ ID NO: 179 - protein, 410 aa, Zea mays
MRSMESTDSSSGELPPPQKQPSSAPDLPPGFRFHPTDEELVVHYLKKKAASVPLPVAIIAEVDLYKFDPWELPDKATFGEQEWYFFSPRDRKYPNGARPNRAATSGYWKATGTDKPIMASGGNREKVGVKKALVFYRGKPPKGLKTNWIMHEYRLADAASSTTSRPPPPCNAGGKATSLRLDDWVLCRIYKKIDKLGVGDPPRIMECGEDSVENAVAAYPTHAAAAAMAVAVAGGGGAYHTGNYTSLIHHHHEDSFLVDGLLTAEDAGGSSLSQLAAAARAAAPTDTTKQLLVPSSTTPFNWLDASALTILPPAKRFHGYNRDTTDGGGTSLPSPSERNNLQAAVGAVDSGASGGTSAVIPSFLNPLGVQGATSYHHHAIFGTPVTPEAAAAAACSFQHPYQLSGVNWNP

SEQ ID NO: 180 - protein, 410 aa, Zea mays; identical to SEQ ID NO: 179

SEQ ID NO: 181 - protein, 75 aa, Zea mays
MRSMESTDSSSGELPPPQKQPSSAPDLPPGFRFHPTDEELVVHYLKKKAASVPLPVAIIAEVDLYKFDPWELPGT

SEQ ID NO: 182 - protein, 339 aa, Zea mays
MSSGGGGRVPAAAAAQSQELQLPPGFRFHPTDEELVVHYLCRRCAGLPISVPIIAEVDLYKHDPWQLPRMALYGEKEWYFFSPRDRKYPNGSRPNRAAGAGYWKATGADKPVGTPKPVAIKKALVFYAGKAPKGDKTNWIMHEYRLADVDRTARKKNNSLRLDDWVLCRIYNKKGALEKPTGAGGRAEASSQGALGSMSMGSPPEQKPSVLPSATATATAAAGTGYAPLPFSELAAYYEVRPSDSMPRAHGADSSCSGHALAATSSCGGGGGERPEVQSQPKIAEWERTFAAGAGPGINPAGSMLGLGGHQLGSAAVGVGLPAGDPLLQDILTYWGKPY

SEQ ID NO: 183 - protein, 318 aa, Zea mays
MASSSRLDLPPGFRFHPTDEEVVSHYLTHKALDSRFSCVVIADADLNKIEPWDLPSKAKMGEKEWFFFCHKDRKYPTGMRTNRATASGYWKATGKDKEIFRGSSSSPRRVLVGMKKTLVFYTGRAPRGGKTPWVMHEYRLEGSLPHNLHRGAKDEWAVCKVINKDLAGKAGQQQMAPPPHAVSVGMERSDSLAFLDDLVLDNADDLPPLVDSTTYAAGSLFAAAGTTTTTNDDSGGYQQATKAEPQPQLPAPSNSPYQHQQQAIRRHCKAEAPAPAMVLSPSRETPGADMFQLQHVDELLQLDGGFMEDYYNMNMWKV

SEQ ID NO: 184 - protein, 1467 aa, Zea mays
MAMVAAAEGSGRRDAEAELNLPPGFRFHPTDEELVVYYLCRKVARQQVPVPIIAEVDLYKFDPWDLPEKALFGRKEWYFFTPRDRKYPNGSRPNRTAGKGYWKATGADKSIVPMGSTRAAGIKKALVFYSGKAPRGVKTDWIMHEYRVAQADHTLGKKGSQKLDEWVLCRLYNKRNNWDKVKVEEQELEAAPRRQHHLQSAEDSMSNSFQTHDSDIDNVFELQNCYGNNMVQGQAMTPRNDIGVVTVKEDNDWFTDMNLDDLQASYNMAHTTNHSTVTFQSFFLKLHPFCPHRTTGDAHVRAAGQCGPILHGLNLGSHEPSAPHSVTHQPPLRDEVSRVTQTAVLRLASGDLRPPSPAAVLCHGPWTVVRQQQGSSLCPTACPPPASATSASGLWAPVSRLCPRRSSSGLRHQALSYSSTAPVPATARSSTPPSRTALKVFDQSPAPWRAFLKAYSHGPFPLEALHLFKHARQHLADDTFVFTFVLKACAGLGWHRAGAQLHALVVQKGFEFHAYVHTALINVYVMSRCLVEARKVFDEMPVKNVVSWNVMITGFAGWGEVEYARLLFDQMPCRNVVSWTGLIDGYTRACLYAEALTLLRHMMAGGISPSEITVLAVIPAISNLGGILMGEMLNGYCEKKGIMSDARVGNSLIDLYAKIGSVQNSLKVFDEMLDRRNLVSWTSIISGFAMHGLSVEALELFAEMRRAGIKPNRITFLSVINACSHGGLVEQGLAFFKSMVYEYNIDPEIKHFGCIIDMLGRAGRLCEAEQIIEGLPMEVNVTVWRILLGCCSKYGEVAMGERAIKMISDLERESGGDFAVLSNVLTELGRFSDAEQARKLLDQRKIVKLQEAVMEAVKKLHAHLVVSGLHNCQYAMSKVIRLYALHQSDLVSAHKVFKQIESPTTFLWNTLLRGLAQSDAPKDAIVFYKKAQEKGMKPDNLTFPFVLKACAKTCAPKEGEQMHNHVIKLGFLLDIFVSNSLIYLYAACGALACARSVFNEMLVKDVVSWNSLIGGYSQHNRLKEVLTLFKLMQAEEVQADKVTMVKVISACTHLGDWSMADCMVRYIEHNHIEVDVYLGNTLIDYYCRIGQLQSAEKVFSQMKDKNTVTLNAMITAYAKGGNLVSAKKIFDQIPNKDLISWSSMICAYSQASHFSDSLELFRQMQRAKVKPDAVVIASVLSACAHLGALDLGKWIHDYVRRNNIKADTIMENSLIDMFAKCGCVQEALQVFTDMEEKDTLSWNSIILGLANNGFEDEALDIFHSMLTEGPRPNEVTFLGVLIACANRQLVEEGLDHFERMKSVHNLEPQMKHYGCVVDILSRAGQLEKAVSFISEMPLAPDPVVWRILLGACRTHGNVAVAEMATKKLSELDPGNSADSMLLSNIYASADRWSDAMNVRRWTADNAVGESELVPDRDDSVLELGIVRKLTTSCAKAGRSISLALEAFPCDIQEQLNRFMDGRIDGIL

SEQ ID NO: 185 - protein, 868 aa, Zea mays
MAMVAAAEGSGRRDAEAELNLPPGFRFHPTDEELVVYYLCRKVARQQVPVPIIAEVDLYKFDPWDLPEKALFGRKEWYFFTPRDRKYPNGSRPNRTAGKGYWKATGADKSIVPMGSTRAAGIKKALVFYSGKAPRGVKTDWIMHEYRVAQADHTLGKKGSQKLDEWVLCRLYNKRNNWDKVKVEEQELEAAPRRQHHLQSAEDSMSNSFQTHDSDIDNVFELQNCYGNNMVQGQAMTPRNDIGVVTVKEDNDWFTDMNLDDLQASYNMAHTTNHSTVTFQSFFLKLHPFCPHRTTGDAHVRAAGQCGPILHGLNLGSHEPSAPHSVTHQPPLRDEVSRVTQTAVLRLASGDLRPPSPAAVLCHGPWTVVRQQQGSSLCPTACPPPASATSASGLWAPVSRLCPRRSSSGLRHQALSYSSTAPVPATARSSTPPSRTALKVFDQSPAPWRAFLKAYSHGPFPLEALHLFKHARQHLADDTFVFTFVLKACAGLGWHRAGAQLHALVVQKGFEFHAYVHTALINVYVMSRCLVEARKVFDEMPVKNVVSWNVMITGFAGWGEVEYARLLFDQMPCRNVVSWTGLIDGYTRACLYAEALTLLRHMMAGGISPSEITVLAVIPAISNLGGILMGEMLNGYCEKKGIMSDARVGNSLIDLYAKIGSVQNSLKVFDEMLDRRNLVSWTSIISGFAMHGLSVEALELFAEMRRAGIKPNRITFLSVINACSHGGLVEQGLAFFKSMVYEYNIDPEIKHFGCIIDMLGRAGRLCEAEQIIEGLPMEVNVTVWRILLGCCSKYGEVAMGERAIKMISDLERESGGDFAVLSNVLTELGRFSDAEQARKLLDQRKIVKLQEAGEVNLMSSSCSSLTSN

SEQ ID NO: 186 - protein, 142 aa, Zea mays
MAMVAAAEGSGRRDAEAELNLPPGFRFHPTDEELVVYYLCRKVARQQVPVPIIAEVDLYKFDPWDLPGVVWSQGVVLLYAAGPQVPKRLAPQPHCRKGVLEGDWGRQVDRAHGQHQGGGDQEGAGVLLWQGAQGRQDGLDYA

SEQ ID NO: 187 - protein, 454 aa, Zea mays
MVAAAEGSGRRDAEAELNLPPGFRFHPTDEELVVYYLCRKVARQQVPVPIIAEVDLYKFDPWDLPEKALFGRKEWYFFTPRDRKYPNGSRPNRTAGKGYWKATGADKSIVPMGSTRAAGIKKALVFYSGKAPRGVKTDWIMHEYRVAQADHTLGKKGSQKLDEWVLCRLYNKRNNWDKVKVEEQELEAAPRRQHHLQSAEDSMSNSFQTHDSDIDNVFELQNCYGNNMVQGQAMTPRNDIGVVTVKEDNDWFTDMNLDDLQASYNMAHTTNHSTVTFQSFFLKLHPFCPHRTTGDAHVRAAGQCGPILHGLNLGSHEPSAPHSVTHQPPLRDEVSRVTQTAVLRLASGDLRPPSPAAVLCHGPWTVVRQQQGSSLCPTACPPPASATSASGLWAPVSRLCPRRSSSGLRHQALSYSSTAPVPATARSSTPPSRTALKVCAPFSASPNSPCFTDF

SEQ ID NO: 188 - protein, 342 aa, Zea mays
MDTFSHVPPGFRFHPTDEELVDYYLRKKVASNKIDLDVIKDVDLYKIEPWDLQEKCKIGMEEQNDWYFFSHKDKKYPTGTRTNRATTAGFWKATGRDKPIYTKSCLVGMRKTLVFYRGRAPNGHKSDWIMHEYRLETTENGTAPEEGWVVCRVFKKRVATVRRMADGAPWFDNHVAGGFMPDLVGSVPRQLMHHHPNAVAAVYSGQQQLYHCKPELEYHHLLPSQDAFLQQLPQLESPKPPPAYIAAQGSCSLQSPDDASGYTARQLPMTEAAYMDDSVTDWRVLDKFVASQLVSHGGDDTAKETAYSSPAQAFQSENRQPEEALDFASTSASGDGEASMWK

SEQ ID NO: 189 - protein, 211 aa, Zea mays
MGGASDSNLLPPGFHFFPSDEELVVHFLRRKASLLPCQPDIVPTVCMNHHDPWELNGKALEAGSQWYFFSHAKQSRATPNGYWSSVCADETVLSGGGGCSVVVGLKKTLVFSTGEPSDGAETNWIMHEYHLLDGRTGGSSSSSSASSIHSSSKKSHHPNTEFSNWVICRVFDSTGGGSQANCHDDEGMELSCLDELFLSLDDYDEVSLSSN

SEQ ID NO: 190 - protein, 436 aa, Zea mays
MGPESADVARDATRGPVQSRVAEVAVHEPVAPPRALSLPNPHPPPLSRGIALPPARRYISFLCPRFSASMTAQNPPTGQDTQSRATPPTIGDQQPAAGASCLKTPSRSRTEDWQAQPKPPLLVLGFIASNPDHIMGQPVTRRRERDAEAELDLPPGFRFHPTDDELVEHYLCRKAAGQRLPVPIIAEVDLYRFDPWDLPERALFGAREWYFFTPRDRKYPNGSRPNRAAGDGYWKATGADKPVAPRAAAADARTLGIKKALVFYAGKAPRGVKTDWIMHEYRLADAGRRAKKGSLRLDDWVLCRLYNKKNEWEKMRLGKGAAAGAVKEEEAMDMSTSHSQITHSWGETRTPESEIVDNDLPFPDPAMMVPKKERVDDGGSARTSDLFVDLSYDDIQGMYSGLDMLPPAGEDLYSSLFASPRVRGNQPTGPAGLGPF

SEQ ID NO: 191 - protein, 312 aa, Zea mays
MGPESADVARDATRGPVQSRVAEVAVHEPVAPPRALSLPNPHPPPLSRGIALPPARRYISFLCPRFSASMTAQNPPTGQDTQSRATPPTIGDQQPAAGASCLKTPSRSRTEDWQAQPKPPLLVLGFIASNPDHIMGQPVTRRRERDAEAELDLPPGFRFHPTDDELVEHYLCRKAAGQRLPVPIIAEVDLYRFDPWDLPERALFGAREWYFFTPRDRKYPNGSRPNRAAGDGYWKATGADKPVAPRAAAADARTLGIKKALVFYAGKAPRGVKTDWIMHEYRLADAGRRAKKGSLRVSFYTQKKERAERGIF

SEQ ID NO: 192 - protein, 566 aa, Zea mays
MNPNPKLPSPPPCPLIDRLMDPMNVPGVPQAANRFTDHGASPSRAGSLENRIIGSEEVPRRFGYEALELRNGGSDYFGKGVLKSSSPISHRRTPIPLPSRPETLSSGNRRPRPPISSPETLSLPSTPAVLEFSVLIRSDSDAAGTDEDEDATPSPPPRHRHQQQLVTRELFLAGAGPPAPAPWHWAELGFFRTDRQQQQAPTDSSNRRRVEEETGIKLNIEDMVDLMTLLDPATGGRMLPSLQDEWYDPAALAASSAWDVAKLRSRFCVPSTPVEDTQCRDLHAGARLCVSCSLDDVNLKFYDAVLDSKLPSLPESKRLTTDQKTLQAQLSVSYRAPAQTSTFDIFGDWQDISQPNFEANPPDGVLAVPLLRHQSWPGLPRGVEFNPSDSDLLWHLAAEVGNALAERHPFINEFIKFVDDVREFICTHPQHIPGVRQDGRASYFFHRSFEPYINENDVNNCLKKIGSHRSIILDGTLMGCKEVFALYADMPSDKRSQETDWRLHQYHLQNTVKAESEIVASKIFLASRNSLCELAEETHIESEWVLLSYQCPFVYIRLEIPIIFVL

SEQ ID NO: 193 - protein, 312 aa, Zea mays
MGLPMRRERDAEAELNLPPGFRFHPTDDELVEHYLCRKAAGQRLPVPIIAEVDLYRFDPWDLPERALFGAREWYFFTPRDRKYPNGSRPNRAAGNGYWKATGADKPVAPRGRTLGIKKALVFYAGKAPRGVKTDWIMHEYRLADAGRAAAAKKGSLRLDDWVLCRLYNKKNEWEKMQLGKTAVAGVGATKEEAMDMATSHTHSHSQSHSHSWGETRTPESEIVDNDPFPELDSFPAFQDPAMMMTVPKEEQVDGCSAKSGNLFVDLSYDDIQGMYSGLDMLPPPGEDFYSSLFASPRVKGNQPAGAAGLGQF

SEQ ID NO: 194 - protein, 380 aa, Zea mays
MDTFSHVPPGFRFHPTDEELVDYYLRNKVASNKIDLDVIKDVDLYKIEPWDLQEKCKIGTEEQNEWYFFSHKDKKYPTGTRTNRATTAGFWKATGRDKPIYTKSCLVGMRKTLVFYRGRAPNGHKSDWIMHEYRLETTENVTAAPVPDDSISSCLHVRTWTMHELVVHQEEGWVVCRVFIKKRVEAVRRMADGAPPWFDGHVPGGFMAPAGLGSPRQLMHHHPNPAAAAPLLYSGQQLYHCKPELEYHHLLQPSQEALLQQLPQLVESPKPPPPAFIDQGSCSLQSPDEASGYNTTPQQPPPMTTEAAYMDDDSVTDWRVLDKFVASQLFSHGDGMAKEDGYPNPGQALFQAENKQPEEALDYASTSASGGGGGEANMWK

SEQ ID NO: 195 - protein, 264 aa, Zea mays
MSQVVHQWPGLPKGVKFDPSDQELIWHLMAKHGKSGIKPHPFIDEFIPTVEEDEGICYTHPQKLPGVKQNGSVSHFFHRTFKAYNTGTRKRRRINTDDADVRWHKTGKTKPVLVDGKHLGCKKIMVLYISPLKGGKAEKTNWVIHQYHLGAGEDERDGEYVVSKLFFQQQFKPGDKNAQELTTSDDLESMAAESNLPDFTTLPTDKHVGTVQEVVHNPEHNLYQLNRNCEISIEETVVLPPSVKTIKDGDNLQSQDQKLWEGDS

SEQ ID NO: 196 - protein, 882 aa, Zea mays
MEASVGAAGGGGGKSKKEEESLPPGFRFHPTDEELITYYLRQKIADASFTARAIAEVDLNKCEPWDLPEKAKLGEKEWYFFSLRDRKYPTGVRTNRATNAGYWKTTGKDKEIFTGQLPATPELVGMKKTLVFYKGRAPRGEKTNWVMHEYRLHHSSRSVPKSNKDEWVVCRVFAKSTGAKKYPSNNAHSRLHHHPYALDMVPPLLQHDPFARHHNYPYMTSADLAELARFARGTPGLHPHIQPAPHPGTSASAYMNPAAAGAPPSFALSGGLSLNLGASPAMPPSLPPTAFHATMSMAMSGQTAAPSCAGTGNNHRHQVVAGEHQQQQMAAAGLGGCVIVPGADGGFVADAAAGGRYQSLDVEQLVERRTMSIHICKNGYMPGYEVWVHHGEDPPPRIVSEVQSHEEEDYDRMEEMLDDVRHEFLTVDSENPGQPTEFEDPATHEEHNVNAHTLRYHVDEPPISDIEIFQWRGKTVGPSTTYYFTNDEWKTALLYMYNNMEEMSQFLLEFDSQNCIYGCERDQIRREGKDGGLNFLCWFRDYVDKNDNIHPDLRQLSLGAVTGRRYGRYDVNGFRFRSTRFEDDHPLSATTNSGVVTRAVDDEGKVTNYYGVINDIIEYKFFGDKQLKVVFFDCDWFSPNTTRENQYGMVEVKHNDRLKGHDTIILAHQCEQVYYMTYPSKKNGLVDWRVVYKVNPRERLYAPGDAGYVESQIEQEVGAAEIFQDEELTSTMSKKMKSLARSLLGSRSSSRSSSRGEDSVFQGTGSTMSRRRALAEHLPPQDDDEIEEPVVEDHARDDVEDDGGDNVGDDAGDDAGGDSGAGDSGAGGDSAAGSGTSRVKRTRKLHFVGPPPELPPESRVVIKPSGKTWIDDSFTGTGHYRQ

SEQ ID NO: 197 - protein, 757 aa, Zea mays
MEASVGAAGGGGGKSKKEEESLPPGFRFHPTDEELITYYLRQKIADASFTARAIAEVDLNKCEPWDLPEKAKLGEKEWYFFSLRDRKYPTGVRTNRATNAGYWKTTGKDKEIFTGQLPATPELVGMKKTLVFYKGRAPRGEKTNWVMHEYRLHHSSRSVPKSNKDEWVVCRVFAKSTGAKKYPSNNAHSRLHHHPYALDMVPPLLQHDPFARHHNYPYMTSADLAELARFARGTPGLHPHIQPAPHPGTSASAYMNPAAAGAPPSFALSGGLSLNLGASPAMPPSLPPTAFHATMSMAMSGQTAAPSCAGTGNNHRHQVVAGEHQQQQMAAAGLGGCVIVPGADGGFVADAAAGGRYQSLDVEQLVERRTMSIHICKNGYMPGYEVWVHHGEDPPPRIVSEVQSHEEEDYDRMEEMLDDVRHEFLTVDSENPGQPTEFEDPATHEEHNVNAHTLRYHVDEPPISDIEIFQWRGKTVGPSTTYYFTNDEWKTALLYMYNNMEEMSQFLLEFDSQNCIYGCERDQIRREGKDGGLNFLCWFRDYVDKNDNIHPDLRQLSLGAVTGRRYGRYDVNGFRFRSTRFEDDHPLSATTNSGVVTRAVDDEGKVTNYYGVINDIIEYKFFGDKQLKVVFFDCDWFSPNTTRENQYGMVEVKHNDRLKGHDTIILAHQCEQVYYMTYPSKKNGLVDWRVVYKVNPRERLYAPGDAGYVESQIEQEVGAAEIFQDEELTSTFNVQTEMLEESLLGDQNDVEVPPKRK

SEQ ID NO: 198 - protein, 268 aa, Zea mays
MAAEQQHQLDLPGFRFHPTEEELLEFYLKQAARGRKLKFDIIPTVHLYRHDPWELPSLARVVGEREWYFFVPRDGGGRAAKQQPGSGGRPSRTTERGFWKATGSDRAVRCAADPKRLIGLKKTLVYYEGRAPRGTKTDWVMNEYRLPDAADASSDARVPQVDVVLCKVYRKAVSLKELEQRVAMEELARATATPSASHSTGSPADSMSSSEIVMVPVGGVSLSPSAAMSMKREEAAKNQQQQDPFLTQLRSPRMESWWSAYYASVLNF

SEQ ID NO: 199 - protein, 357 aa, Zea mays
MERFGLDGGGGGGELPPGFRFHPTDEELITYYLLRKAVDGSFCGRAIAEIDLNKCEPWELPDKAKMGEKEWYFYSLRDRKYPTGLRTNRATVAGYWKATGKDREIRSGRTGALVGMKKTLVFYRGRAPKGQKTHWVMHEYRLEGAYAYHFLPSSTRDEWVIARVFQKPGEVPPAARKHRLGALSSTTGTAAGDSCFSDSTSASIGGASSSSTPGPLFASAAAAVANAGAADGDTSSYCGGAANHGNLVTGRELVPCFSTATINGPLVAAALGIGQPYNAAPLPFEQQPPPPAFLPSLRSLQDNLQLPPFLSAGGLGGGGALHWLPAGGMEVKVEGRSAPPQMAVGPGQLDGAFGWSF

SEQ ID NO: 200 - protein, 358 aa, Zea mays
MERFGLDGGGGGGELPPGFRFHPTDEELITYYLLRKAVDGSFCGRAIAEIDLNKCEPWELPDKAKMGEKEWYFYSLRDRKYPTGLRTNRATVAGYWKATGKDREIRSGRTGALVGMKKTLVFYRGRAPKGQKTHWVMHEYRLEGAYAYHFLPSSTRQDEWVIARVFQKPGEVPPAARKHRLGALSSTTGTAAGDSCFSDSTSASIGGASSSSTPGPLFASAAAAVANAGAADGDTSSYCGGAANHGNLVTGRELVPCFSTATINGPLVAAALGIGQPYNAAPLPFEQQPPPPAFLPSLRSLQDNLQLPPFLSAGGLGGGGALHWLPAGGMEVKVEGRSAPPQMAVGPGQLDGAFGWSF

SEQ ID NO: 201 - protein, 664 aa, Zea mays
MAPVSLPPGFRFHPTDEELIIYYLKRKINGRQIELEIIPEVDLYKCEPWDLPEKSFLPSKDLEWYFFSPRDRKYPNGSRTNRATKSGYWKATGKDRKVNSHRRAVGMKKTLVYYRGRAPHGSRTDWVMHEYRLDERECETDTGLQDAYALCRVFKKTAPGPKIIEHYGAVHHPIEHPQWMAEAGSVDRHSPTLDLSSDARGDDFESSSFSFPTEAPSMDSMHGMQMSAPHEDGKWMQFLSEDAFNATNNPFFMNPPSSSSFPCLPSKVDVALECARIQHRLSLPPLEVEDFPQDVSLDTKASVLRSNPNEVDILQEFLSVASASQELINGATSSCYAAELWPSGAGTSSTSTHYVNELSSLVELGVKAKEEADNFYYMDCIVGTSVGFSSKSSVQVDEQAVRLVEIADIEGLKQEEKRQVENLRGVRLHNNDLGEIVVQGDESNPTDCITQYPISDYSADNLGEAGHLADPTDVGGGLATAPIFSQSQPDDFAIGFGDVDVNPNASFDLYERVDVKHGLFVSTAGAPKTFFHHVEPSKKVSVYLSPVASDVVGKATEKFHSPITVTATKASVFSKLKALVTRQGQIPGGEDASIMPPEVLRQQRNSGSPTTMNTEQELVKKAKKVMKPGHGGGDGNQACLLLPLSKRSKGISSMFFSVRNGHNF

SEQ ID NO: 202 - protein, 422 aa, Zea mays
MVLWRTGGAWWCYLARAPHYKAPPHTIPQLRASSHHLVERKSESEVGKGIGFLVDQIPFPSWILIFLLRSHQIDLTTCLRSKPLCMHHHHQDQAMGDALWDLLGEEMAAAGGEHGLPPGFRFHPTDEELVTFYLAAKVFNGACCGIDIAEVDLNRCEPWELPDAARMGEREWYFFSLRDRKYPTGLRTNRATGAGYWKATGKDREVLNAATGALLGMKKTLVFYKGRAPRGEKTKWVLHEYRLDGDFAAARRPCKEEWVICRILHKAGDQYSKLMMVKSPYYLPMAMDPSSFCFQEDPTGHPLPNPSGCTPFHHGHPHHSMQPPPPLPPSNHAGKAVFTGAAAACCMQQEPADGSNSAVLPMPPFPPFTPIVAGKPAAPAPPPQVVNAGPQEPPPPTWLEAYLQHTGGILYEMGPTAAPRGA

SEQ ID NO: 203 - protein, 387 aa, Zea mays
MVLWRTGGAWWCYLARAPHYKAPPHTIPQLRASSHHLIDLTTCLRSKPLCMHHHHQDQAMGDALWDLLGEEMAAAGGEHGLPPGFRFHPTDEELVTFYLAAKVFNGACCGIDIAEVDLNRCEPWELPDAARMGEREWYFFSLRDRKYPTGLRTNRATGAGYWKATGKDREVLNAATGALLGMKKTLVFYKGRAPRGEKTKWVLHEYRLDGDFAAARRPCKEEWVICRILHKAGDQYSKLMMVKSPYYLPMAMDPSSFCFQEDPTGHPLPNPSGCTPFHHGHPHHSMQPPPPLPPSNHAGKAVFTGAAAACCMQQEPADGSNSAVLPMPPFPPFTPIVAGKPAAPAPPPQVVNAGPQEPPPPTWLEAYLQHTGGILYEMGPTAAPRGA

SEQ ID NO: 204 - protein, 418 aa, Zea mays
MVLWRTGGAWWCYLARAPHYKAPPHTIPQLRASSHHLVERKSESEIDLTTCLRSKPLCMHHHHQDQAMGDALWDLLGEEMAAAGGEHGLPPGFRFHPTDEELVTFYLAAKVFNGACCGIDIAEVDLNRCEPWELPDAARMGEREWYFFSLRDRKYPTGLRTNRATGAGYWKATGKDREVLNAATGALLGMKKTLVFYKGRAPRGEKTKWVLHEYRLDGDFAAARRPCKEYSFCVCIHQWHYNSWCKHDDALEEWVICRILHKAGDQYSKLMMVKSPYYLPMAMDPSSFCFQEDPTGHPLPNPSGCTPFHHGHPHHSMQPPPPLPPSNHAGKAVFTGAAAACCMQQEPADGSNSAVLPMPPFPPFTPIVAGKPAAPAPPPQVVNAGPQEPPPPTWLEAYLQHTGGILYEMGPTAAPRGA

SEQ ID NO: 205 - protein, 395 aa, Zea mays
MTMAATTTMMSAAAQAATSQLPPGFRFHPTDEELILHYLRNRAASAPCPVPIIADVDIYKFDPWDLPAKALYGDGEYYFFSPRDRKYPNGIRPNRAAGSGYWKATGTDKPIHDAATGEGVGVKKALVFYKGRPPRGSKTNWIMHEYRLAAVAGCTSPLAAYRPPSKFRNVSMRLDDWVLCRIYKKSGHASPMVPPLADYEHLDRDGPSPGGFFDDYFCGSTSLYAAAAPAIGGGAAAAGTTNTTTTPAVVMQQHQQPAALPRLPKIPSISELLWDEYALAQILDPPADVAADHASFAVHPSLNQLLAVGDDGSDLMMFSPPPAAAAGGKRKAMVAMNMSPADECAATAHQHQSPAAKRLNGGSCFDDAPQPASGLPATMSSVLGGGLNHHMLPQF

SEQ ID NO: 206 - protein, 349 aa, Zea mays
MAAFSSSNGVPPGFRFHPTDEELLLYYLKKKVGFEKFELEVIREVDLNKIEPWELQETCRIGSAPQNEWYFFSHKDRKYPTGSRTNRATTAGLWKATGRDKCIRTSYRKIGMRKTLVFYRGRAPHGQKTDWIMHEYRLEDADDDDAQGGTSEDGWVVCRVFKKKCFFKIGGGEGSTTSSQGADAGGHLATMSPPLGGHHDLAYMHPHPYYHHAASYYSQMQAPGPHATAYSHHVQVQDLLTNHRPTDDDGAGTGYDFSGLPVENQPGGGLDVGSSDGVATDDGGQLAGERRDQTTGTAADHQWQAMDGFSNGGSAEVQQMTGAQRGGEMDLWGYGRLCGHAEETNKHKD

SEQ ID NO: 207 - protein, 309 aa, Zea mays
MMESSGGSGSSDPLLLAPGFRFYPTEEELLTFYLRHRLAGTKPVVEHLIPVMDIYGYHPSELQAMAGAANVCDTEQWFFFCPRAERELHGGRPARTTPSGYWKATGSPSYVYSSSPNNRVIGEKRTMVFYQGRAPTGNRTRWKMNEYKAVADDAPPAPGAPVMLRNDFSVCRVYISTGTLRSFDRRPLNRPGGLAVVSAHQQAVHCGYQQQQLQPQLPPPAAVAKTTTRHHHQQMHAAVVVDDDAADSNGRHAAAAENSHDSSSSGSRGGVDGAEDAAMAIDWDSLIPPVDDLAFRGVDDLTRVIWPHN

SEQ ID NO: 208 - protein, 349 aa, Zea mays; identical to SEQ ID NO: 72

SEQ ID NO: 209 - protein, 289 aa, Zea mays
MDTSWIMNGLGLAEKIRSATQSFTLRLGELFAKPRTKCTYCDCVIDISNVSLVWPALPAGVKFDPTDLEILQHLQEKSSLPNSVSHTLIDEFIPTIKEEEGICYTHPKNFPGIKMDGSYLHFFNRVLNAYDTGTRKRRRIIATGDICDGVVNGNSRWHKTGASKPVFDENGVRKGWKKILVLYKAPKKVGDRPERENWVMHQYHLGVNEDESNGEFVVCKVFYQSPLKKNGKSKTDVVVESDASVAKINPRTPMTDPPQRRRLNNSSCNTGQHTPTQDDRGKKNVAHQR

SEQ ID NO: 210 - protein, 438 aa, Zea mays
MDTSWIMNGLGLAEKIRSATQSFTLRLGELFAKPRTKCTYCDCVIDISNVSLVWPALPAGVKFDPTDLEILQHLQEKSSLPNSVSHTLIDEFIPTIKEEEGICYTHPKNFPGIKMDGSYLHFFNRVLNAYDTGTRKRRRIIATGDICDGVVNGNSRWHKTGASKPVFDENGVRKGWKKILVLYKAPKKVGDRPERENWVMHQYHLGVNEDESNGEFVVCKVFYQSPLKKNGKSKTDVVVESDASVAKINPRTPMTDPPQRRRLNNSSCNTGQHTPTQALQGEEECGTSKMKTEAAECSACFAESSPAIPTSDAPVRTPMTDRPQPRRLNNSRCNTRRCTPIQSDQGAEECGTSKVKIEAAECSSACIAELSPAIPTSAEPMQPTDALDASLPVDDLFHGLLDLDNTLPFTETPSGGGISLDDIFGPLDSLGAWPDGFL

SEQ ID NO: 211 - protein, 452 aa, Zea mays
MAQTSLPPGFRFHPTDVEIVSYYLKRKIMGKKLIVDAISEVDLYKFPPWDLPEKSSLRSKDLEWFFFCPRDKKYPNGSRTNRATPNGYWKTSGKDRIIMLNSRTVGMKKTLIFHEGKPPKGDRTDWVMYEYKMEDEYLVSTGFSKDTYVLCKIFKKSGLGPRIGEQYGAPFDEAEWDNAEAETSIFPLMTSSEVVNPTEGPHTQPVAPAGALQEPLHNSSATCVVEGSPFDHATANTCAEGVTFGYTVASSAIEDMPAQLSGDGVVSMNNISSEVNDMYSPHDCDEFLLEEMSRFLNDSPMRNTPYGECSGLPPMSEAEAHAFEVNSFDLYKELSGLVELGGMDNNFNTSNVETTDYLVLPPDRELSTDGYMELNDLLASDSSFPIPSEFPAQDNQSMQYPLAEYNVHYDVATLSGPLEPTMPSIFDDFPPNNGPHVTDEEDDYLDPTIPFP

SEQ ID NO: 212 - protein, 452 aa, Zea mays; identical to SEQ ID NO: 211

SEQ ID NO: 213 - protein, 181 aa, Zea mays
MEMNKKIKEDLKAVALGTSKVNYFDSRITVAWCKRHEVPIEKVFFHGRIIVDWWCQRAGEGGTKVMQPPPQLPAALPVGFRFRPTDEELVLHYLKPKIAGRAHADLLLIPDVDLSACEPWELPAKALIRSDDPEWFFFAPLDRKYPGGHRSNRSTAAGYWKATGKDRLIRSRPAGTLIGVK

SEQ ID NO: 214 - protein, 272 aa, Zea mays
MAEFAPGFRFYPTEEELICFYLRNKLSGTRRADIERVIPVADVCTLDPWDLISGTFIRQAHRGACSGNEEPWFYFCPRQEREARGGRPSRTTPSGYWKAAGTPGLVYAADGRPIGTKKTMVFYRGRAPAGAKTKWKLNEYKAFEDDDATAAVAAPAPPSHALQTWSQYSLCRLYTKSGCLRQFDRRRSSTAAATGGGNENKPPAPSTALPDGDQTGQKRKRAAPTDDTSSSYEDGDEDVSTQQRLRLAQRGADDEGVKDMTDWWSEFLDDCI

SEQ ID NO: 215 - protein, 371 aa, Zea mays
MYCKDDHVKQLPFSHASKHINTAVNQVRTSASIRPHRHGHACKQQSSPRNLELARHRNQERTIQAMEDDEEKPSQRITNKEEDEEDDDLVFPGFRFHPTDLELVGFYLKRKVEKKGFRIDIIREIDIYKHDPWDLPNEARHVVQGAGGDKDDWYFFCLRGRKYRNSIRPNRVTGSGFWKATGIDKPIHDGAGERVVGLKKSLVYYRGSAGRGNKTDWMMHEFRLPSAELVELHDAGIWTICRIFKRNTSYTRRCQQQKQEYGSKRSQQQEQELQYYYDYYRYHHHHHQHHYFHSSEAVYAAAEHHRQPSFLLRGFHGSSSSSAETTTTSGFVGAHPLLPPSTTSTLGWSDAASLRDSGISTWDELGRILEI

SEQ ID NO: 216 - protein, 358 aa, Zea mays
MAPRKEIMAGDHGGGEGEEVVVLVGDYDYELEEEDEDMLPGFRFHPTDEELVTFYLRRKVAGKRLTIEIIKDFDIYKHDPWDLPKSSSISGEKEWYFFCLRGRKYRNSIRPNRVTGSGFWKATGIDRPIHSAASGRAGDPIGLKKSLVFYRGSAGKGTKTEWMMHEFRLPPRADTAHASPSEQEAEVWTICRIFRRNFTYKKQGVHCSSKVSSAAAVVAQPGESSSVTAGSMESDTGDEYTNGLLPQTPLLQDPVNMIDGYSYSYGYDHHHHQQQQLQHGQWNSHALHAAATAPLPSPTTMAAFHHGVLSSPPAAASGPLDDMYYKDGSSWDDIGRMVMELTDPSPSVFSFYDTRSYA

SEQ ID NO: 217 - protein, 251 aa, Zea mays
MMAGGDHEEGEEVVLVVGDEEEEEEEDVLPGFRFHPTDEELVTFYLRRKVAGKRLSIEIIRDFDIYKHDPWDLPKSSSISGEKEWYFFCLRGRKYRNSIRPNRVTGTGSASGGHRIDRPVHSSGRARAPVVVVGLKKSLVSTAAARQGHQDGVDDARVSASRRALTTPPTPRPPASERQRVWDRLPGLQEELHLQRNTPSSSSSSSRWLQAAARCPPAPARPPSRSPASRAPSPAASNRTPGTSTLIRSGE

SEQ ID NO: 218 - protein, 447 aa, Zea mays
MSGGGGGRHENGHGGAAAAGGSGGSSDAHEDDLVMPGFRFHPTEEELIEFYLRRKVEGKRFNVELITFLDLYRYDPWELPAMAAIGEKEWYFYVPRDRKYRNGDRPNRVTASGYWKATGADRTIKADNSRPIGLKKTLVFYSGKAPKGVRSSWIMNEYRLPPDDTDRYHKTEISLCRVYKRTGIDDGGHGHPASARSTPSRGVVTAPQQDNKQQASSSSTPTPPTTPSKMMQFLHGECTSSQPAAICRNSHHAAAAAHSNNKAAAAGAQRQSQLLPTKPYCSGYQQLSTASSAGSAVGAAVDHHHHQQQQQQAGTGAAAVSTSSSSSRNASYALAAASTYSLLSLVNAASMGGSGSAAAIDELSTLVGHVHGAPPYFNHQAAAAGGHGHGHGFVLPLPTTPSSQQPMAALGTLPLSLAAISDKIWDWNPVGPDATARDYGSATGGFK

SEQ ID NO: 219 - protein, 370 aa, Zea mays
MRAAMAAIGEKEWYFYVPRDRKYRNGDRPNRVTASGYWKATGADRTIKADNSRPIGLKKTLVFYSGKAPKGVRSSWIMNEYRLPPDDTDRYHKTEISLCRVYKRTGIDDGGHGHPASARSTPSRGVVTAPQQDNKQQASSSSTPTPPTTPSKMMQFLHGECTSSQPAAICRNSHHAAAAAHSNNKAAAAGAQRQSQLLPTKPYCSGYQQLSTASSAGSAVGAAVDHHHHQQQQQQAGTGAAAVSTSSSSSRNASYALAAASTYSLLSLVNAASMGGSGSAAAIDELSTLVGHVHGAPPYFNHQAAAAGGHGHGHGFVLPLPTTPSSQQPMAALGTLPLSLAAISDKIWDWNPVGPDATARDYGSATGGFK

SEQ ID NO: 220 - protein, 292 aa, Zea mays
MAVGLPPGYRFYPTEEELICFYLRNKLDNLRDDIERVIPVVDVYSVDPCQLPGIHELLCDGGAGAGEGEPWFYFCPRQEREARGGRPSRTTPSGYWKAAGTPGAVYSADRRAIGVKKTMVFYYGRAPSGTKTKWKMNEYRAFQFETPGPGLGLAAAGVAADGSSSSSAHHAADGPAPPPNVGPQLRGEFSLCRLYTKSGSLRQFDRRPLAATGGVVVPGEDPAGPFTAVAASPPDDDDGSGSSMQQQQQQLTGGGANNDPYGDGVVTEREDAHDPFGDDVAMLDALLYWPGD

SEQ ID NO: 221 - protein, 296 aa, Zea mays
MGLRDIELTLPPGFRFYPSDEELVCHYLHGKVANERLAGAGAAMVEVDLHTHEPWELPDVAKLSTNEWYFFSFRDRKYATGLRTNRATKSGYWKATGKDRVIHTPCSRPAAGGGHHRAVVGMRKTLVFYRGRAPNGVKTSWVMHEFRMENPHTPPKEDWVLCRVFYKKKADAMDYADCSDQDAIAVHVPRGSADPGYCYSPPPFPALGGSHHHGGSLNDDFHGGMALLQQQQHNGVFDFHGGQPHPHGGGGGLLAGPPATAVGSRDGGDQCGSGVLMDLGLDDHYAYNSYNSLLQM

SEQ ID NO: 222 - protein, 171 aa, Zea mays
MFVLEEKSFLPGRDSEWYFFGPRDRKYPNGCRTNRATQAGYWKSTGKDRQISYQNRSIGMKKTLVYYKGRAPQGLRTSWVMHEYRIEESECENTMGIQDSYALCRVFKKNVALGELQKQKQGECSSSQSKEKQEQFTSIRDAGQSSGSNEHGKDNTWMQFIADDLWCNQTK

SEQ ID NO: 223 - protein, 361 aa, Zea mays
MLMSFAGSAPDPTILMFSESWPGLPRGVEFNPSDSDLLWHLAAEVGNALAERHPFINEFIKFVDDVREFICTHPQHIPGVRQDGRASYFFHRSFEPYINENDVNNCWKKIGSPRSIILDGTLTGCKEVFALYADMPSDKRSQETDWRLHQYHLQNTVKAESEIVASKIFLASRNSLCELAEETHIESEWDVSTHKDSSVECAKGFNPEICTETDELDHISLKERYRILLADKSLGLTTVSAGKSIMHVETSRASPKRNHEGKISKEDIFSMLQEISSAPSIIESNPMDDDSNRRILGEDLPVEGSENQIGGTATCMGENSELVARKQGAHLADVKLEPALGGYEIGPSELPQENSTHAEGS

SEQ ID NO: 224 - protein, 348 aa, Zea mays
MEHDVHHQHQQAMELPPGFRFHPTDEELITHYLARKAADARFAPRAVGEADLNKCEPWDLPSRATMGEKEWYFFCVKDRKYPTGLRTNRATESGYWKATGKDREIFRSKALVGMKKTLVFYTGRAPRGGKTGWVMHEYRLHGKHASSSRLMPSSVRAGASKDEWVLCRVFKKSIEPPPSVGKRSSVACTGTMVVEDVVGPPSMSMEDDLTACALPPLMDVSGGGGANMAAASIELLAPPAPHVTCFSNALEGQFFLNPPCLHPSTSPLRLASMVQAQAQAQYDGDAGMVLQLLQEAGGWYSKLGEGERLSGGASQDTGVTSEVNVNPAEISSTRHHIMDPEAASFWGF

SEQ ID NO: 225 - protein, 348 aa, Zea mays; identical to SEQ ID NO: 224

SEQ ID NO: 226 - protein, 371 aa, Zea mays
MVEPSVKSSEHGGGGIDLLFLPPGFRFHPTDEEVITSYLLQKLLNPSFAPHAIGEVDLNKCEPWDLPSKAKMGEEDSKEWYFFCRKGMKYPTGTRANRATKEGYWKATGKDREIFFKPAAGHDDVDRREQLVGMKKTLVFYTGRAPRGTKTNWVMHEFRLIEGKGKYSRHRTTNDDLLLRFNPKDEWVVCKVHHKGGRHDASAAKKGGGGGGGEEQQYSSAAGTPNVSSVEAGGGGDDDEFLLDSVLLDYSSSCHFNSSGPTACTSSSRSRSMPPPRRHAPPADQQQAIMVGGSYYYTSLHHHHQEMVAPTRFAAAAGLPSACASAAGAGAAQRSSQQHGVLQQQRLPAGNYNYYDDGGNYYAAGYRTSQY

SEQ ID NO: 227 - protein, 317 aa, Arabidopsis thaliana
MGIQETDPLTQLSLPPGFRFYPTDEELMVQYLCRKAAGYDFSLQLIAEIDLYKFDPWVLPNKALFGEKEWYFFSPRDRKYPNGSRPNRVAGSGYWKATGTDKIISTEGQRVGIKKALVFYIGKAPKGTKTNWIMHEYRLIEPSRRNGSTKLDDWVLCRIYKKQSSAQKQVYDNGIANAREFSNNGTSSTTSSSSHFEDVLDSFHQEIDNRNFQFSNPNRISSLRPDLTEQKTGFHGLADTSNFDWASFAGNVEHNNSVPELGMSHVVPNLEYNCGYLKTEEEVESSHGFNNSGELAQKGYGVDSFGYSGQVGGFGFM

SEQ ID NO: 228 - protein, 316 aa, Oryza sativa
MGMGMRRERDAEAELNLPPGFRFHPTDDELVEHYLCRKAAGQRLPVPIIAEVDLYKFDPWDLPERALFGAREWYFFTPRDRKYPNGSRPNRAAGNGYWKATGADKPVAPRGRTLGIKKALVFYAGKAPRGVKTDWIMHEYRLADAGRAAAGAKKGSLRLDDWVLCRLYNKKNEWEKMQQGKEVKEEASDMVTSQSHSHTHSWGETRTPESEIVDNDPFPELDSFPAFQPAPPPATAMMVPKKESMDDATAAAAAAATIPRNNSSLFVDLSYDDIQGMYSGLDMLPPGDDFYSSLFASPRVKGTTPRAGAGMGMVPF

SEQ ID NO: 229 - protein, 9 aa, Zea mays
YWKATGKDR

SEQ ID NO: 230 - protein, 11 aa, Zea mays
PATPPPPPLPP

SEQ ID NO: 231 - protein, 15 aa, Zea mays
AAGAVVASSAWMNHF

SEQ ID NO: 232 - protein, 9 aa, Zea mays
RWHKTGKTR

SEQ ID NO: 233 - protein, 9 aa, Zea mays
FWKATGRDK

SEQ ID NO: 234 - protein, 9 aa, Zea mays
YWKATGADK

SEQ ID NO: 235 - protein, 7 aa, Artificial
  replacement for DNA binding motif
AAAAAGG

SEQ ID NO: 236 - DNA, 17 bp, Zea mays
gggatagatagatgtgg

SEQ ID NO: 237 - DNA, 17 bp, Zea mays
gccaagcccggcttctc

SEQ ID NO: 238 - protein, 9 aa, Zea mays
RWHKTGASK

SEQ ID NO: 239 - protein, 9 aa, Zea mays
RWHKTGKTK

SEQ ID NO: 240 - protein, 9 aa, Zea mays
RWHKTGKTR

SEQ ID NO: 241 - protein, 9 aa, Zea mays
RWHKTGNTK

SEQ ID NO: 242 - protein, 9 aa, Zea mays
RWHKTGRSK

SEQ ID NO: 243 - protein, 9 aa, Zea mays
RWHKTGSSK

SEQ ID NO: 244 - protein, 9 aa, Zea mays
RWKPSGKEK

SEQ ID NO: 245 - protein, 9 aa, Zea mays
RWRPAGKEK

SEQ ID NO: 246 - protein, 9 aa, Zea mays
TWHSEAKPK

SEQ ID NO: 247 - protein, 9 aa, Zea mays
VWRPSGKET

SEQ ID NO: 248 - protein, 9 aa, Zea mays
YWKAAGTPG

SEQ ID NO: 249 - protein, 9 aa, Zea mays
YWKATGADK

SEQ ID NO: 250 - protein, 9 aa, Zea mays
YWKATGADR

SEQ ID NO: 251 - protein, 9 aa, Zea mays
YWKATGKDC

SEQ ID NO: 252 - protein, 9 aa, Zea mays
YWKATGKDK

SEQ ID NO: 253 - protein, 9 aa, Zea mays
YWKATGKDR

SEQ ID NO: 254 - protein, 9 aa, Zea mays
YWKATGKEE

SEQ ID NO: 255 - protein, 9 aa, Zea mays
YWKATGKEK

SEQ ID NO: 256 - protein, 9 aa, Zea mays
YWKATGPDR

SEQ ID NO: 257 - protein, 9 aa, Zea mays
YWKATGSPS

SEQ ID NO: 258 - protein, 9 aa, Zea mays
YWKATGTDK

SEQ ID NO: 259 - protein, 9 aa, Zea mays
YWKITGKDC

SEQ ID NO: 260 - protein, 9 aa, Zea mays
YWKSTGKDR

SEQ ID NO: 261 - protein, 9 aa, Zea mays
YWKTSGKDR

SEQ ID NO: 262 - protein, 9 aa, Zea mays
YWKTTGKDK

SEQ ID NO: 263 - protein, 9 aa, Zea mays
YWKTTGKDR

SEQ ID NO: 264 - protein, 9 aa, Zea mays
YWNPAGADE

SEQ ID NO: 265 - protein, 9 aa, Zea mays
YWSSVCADE

SEQ ID NO: 266 - protein, 664 aa, Zea mays; identical to SEQ ID NO: 46

SEQ ID NO: 267 - protein, 709 aa, Zea mays; identical to SEQ ID NO: 47

SEQ ID NO: 268 - protein, 409 aa, Zea mays; identical to SEQ ID NO: 49

SEQ ID NO: 269 - protein, 365 aa, Zea mays; identical to SEQ ID NO: 50

SEQ ID NO: 270 - protein, 373 aa, Zea mays; identical to SEQ ID NO: 54

SEQ ID NO: 271 - protein, 295 aa, Zea mays; identical to SEQ ID NO: 55

SEQ ID NO: 272 - protein, 322 aa, Zea mays; identical to SEQ ID NO: 59

SEQ ID NO: 273 - protein, 362 aa, Zea mays; identical to SEQ ID NO: 62

SEQ ID NO: 274 - protein, 413 aa, Zea mays; identical to SEQ ID NO: 64

SEQ ID NO: 275 - protein, 380 aa, Zea mays; identical to SEQ ID NO: 66

SEQ ID NO: 276 - protein, 433 aa, Zea mays; identical to SEQ ID NO: 67

SEQ ID NO: 277 - protein, 319 aa, Zea mays; identical to SEQ ID NO: 68

SEQ ID NO: 278 - protein, 315 aa, Zea mays; identical to SEQ ID NO: 70

SEQ ID NO: 279 - protein, 399 aa, Zea mays; identical to SEQ ID NO: 71

SEQ ID NO: 280 - protein, 349 aa, Zea mays; identical to SEQ ID NO: 72

SEQ ID NO: 281 - protein, 369 aa, Zea mays; identical to SEQ ID NO: 74

SEQ ID NO: 282 - protein, 241 aa, Zea mays; identical to SEQ ID NO: 75

SEQ ID NO: 283 - protein, 293 aa, Zea mays; identical to SEQ ID NO: 76

SEQ ID NO: 284 - protein, 295 aa, Zea mays; identical to SEQ ID NO: 77

SEQ ID NO: 285 - protein, 277 aa, Zea mays; identical to SEQ ID NO: 78

SEQ ID NO: 286 - protein, 231 aa, Zea mays; identical to SEQ ID NO: 80

SEQ ID NO: 287 - protein, 202 aa, Zea mays; identical to SEQ ID NO: 81

SEQ ID NO: 288 - protein, 323 aa, Zea mays; identical to SEQ ID NO: 83

SEQ ID NO: 289 - protein, 325 aa, Zea mays; identical to SEQ ID NO: 84

SEQ ID NO: 290 - protein, 294 aa, Zea mays; identical to SEQ ID NO: 88

SEQ ID NO: 291 - protein, 391 aa, Zea mays; identical to SEQ ID NO: 90

SEQ ID NO: 292 - protein, 305 aa, Zea mays; identical to SEQ ID NO: 92

SEQ ID NO: 293 - protein, 517 aa, Zea mays; identical to SEQ ID NO: 93

SEQ ID NO: 294 - protein, 308 aa, Zea mays; identical to SEQ ID NO: 94

SEQ ID NO: 295 - protein, 379 aa, Zea mays; identical to SEQ ID NO: 95

SEQ ID NO: 296 - protein, 326 aa, Zea mays; identical to SEQ ID NO: 97

SEQ ID NO: 297 - protein, 526 aa, Zea mays; identical to SEQ ID NO: 98

SEQ ID NO: 298 - protein, 672 aa, Zea mays; identical to SEQ ID NO: 99

SEQ ID NO: 299 - protein, 300 aa, Zea mays; identical to SEQ ID NO: 100

SEQ ID NO: 300 - protein, 297 aa, Zea mays; identical to SEQ ID NO: 102

SEQ ID NO: 301 - protein, 343 aa, Zea mays; identical to SEQ ID NO: 103

SEQ ID NO: 302 - protein, 259 aa, Zea mays; identical to SEQ ID NO: 104

SEQ ID NO: 303 - protein, 367 aa, Zea mays; identical to SEQ ID NO: 107

SEQ ID NO: 304 - protein, 418 aa, Zea mays; identical to SEQ ID NO: 108

SEQ ID NO: 305 - protein, 225 aa, Zea mays; identical to SEQ ID NO: 110

SEQ ID NO: 306 - protein, 362 aa, Zea mays; identical to SEQ ID NO: 111

SEQ ID NO: 307 - protein, 261 aa, Zea mays; identical to SEQ ID NO: 113

SEQ ID NO: 308 - protein, 386 aa, Zea mays; identical to SEQ ID NO: 114

SEQ ID NO: 309 - protein, 357 aa, Zea mays; identical to SEQ ID NO: 115

SEQ ID NO: 310 - protein, 399 aa, Zea mays; identical to SEQ ID NO: 116

SEQ ID NO: 311 - protein, 445 aa, Zea mays; identical to SEQ ID NO: 118

SEQ ID NO: 312 - protein, 398 aa, Zea mays; identical to SEQ ID NO: 120

SEQ ID NO: 313 - protein, 336 aa, Zea mays; identical to SEQ ID NO: 122

SEQ ID NO: 314 - protein, 494 aa, Zea mays; identical to SEQ ID NO: 123

SEQ ID NO: 315 - protein, 657 aa, Zea mays; identical to SEQ ID NO: 125

SEQ ID NO: 316 - protein, 338 aa, Zea mays; identical to SEQ ID NO: 3

SEQ ID NO: 317 - protein, 354 aa, Zea mays; identical to SEQ ID NO: 127

SEQ ID NO: 318 - protein, 329 aa, Zea mays; identical to SEQ ID NO: 128

SEQ ID NO: 319 - protein, 368 aa, Zea mays; identical to SEQ ID NO: 129

SEQ ID NO: 320 - protein, 359 aa, Zea mays; identical to SEQ ID NO: 130

SEQ ID NO: 321 - protein, 665 aa, Zea mays; identical to SEQ ID NO: 133

SEQ ID NO: 322 - protein, 317 aa, Zea mays; identical to SEQ ID NO: 134

SEQ ID NO: 323 - protein, 475 aa, Zea mays; identical to SEQ ID NO: 136

SEQ ID NO: 324 - protein, 259 aa, Zea mays; identical to SEQ ID NO: 137

SEQ ID NO: 325 - protein, 425 aa, Zea mays; identical to SEQ ID NO: 139

SEQ ID NO: 326 - protein, 368 aa, Zea mays; identical to SEQ ID NO: 141

SEQ ID NO: 327 - protein, 298 aa, Zea mays; identical to SEQ ID NO: 142

SEQ ID NO: 328 - protein, 420 aa, Zea mays; identical to SEQ ID NO: 145

SEQ ID NO: 329 - protein, 392 aa, Zea mays; identical to SEQ ID NO: 146

SEQ ID NO: 330 - protein, 359 aa, Zea mays; identical to SEQ ID NO: 147

SEQ ID NO: 331 - protein, 160 aa, Zea mays; identical to SEQ ID NO: 150

SEQ ID NO: 332 - protein, 317 aa, Zea mays; identical to SEQ ID NO: 151

SEQ ID NO: 333 - protein, 313 aa, Zea mays; identical to SEQ ID NO: 152

SEQ ID NO: 334 - protein, 419 aa, Zea mays; identical to SEQ ID NO: 153

SEQ ID NO: 335 - protein, 348 aa, Zea mays; identical to SEQ ID NO: 155

SEQ ID NO: 336 - protein, 303 aa, Zea mays; identical to SEQ ID NO: 156

SEQ ID NO: 337 - protein, 368 aa, Zea mays; identical to SEQ ID NO: 158

SEQ ID NO: 338 - protein, 312 aa, Zea mays; identical to SEQ ID NO: 159

SEQ ID NO: 339 - protein, 356 aa, Zea mays; identical to SEQ ID NO: 160

SEQ ID NO: 340 - protein, 612 aa, Zea mays; identical to SEQ ID NO: 161

SEQ ID NO: 341 - protein, 436 aa, Zea mays; identical to SEQ ID NO: 163

SEQ ID NO: 342 - protein, 282 aa, Zea mays; identical to SEQ ID NO: 166

SEQ ID NO: 343 - protein, 518 aa, Zea mays; identical to SEQ ID NO: 167

SEQ ID NO: 344 - protein, 435 aa, Zea mays; identical to SEQ ID NO: 168

SEQ ID NO: 345 - protein, 283 aa, Zea mays; identical to SEQ ID NO: 169

SEQ ID NO: 346 - protein, 687 aa, Zea mays; identical to SEQ ID NO: 170

SEQ ID NO: 347 - protein, 408 aa, Zea mays; identical to SEQ ID NO: 171

SEQ ID NO: 348 - protein, 344 aa, Zea mays; identical to SEQ ID NO: 174

SEQ ID NO: 349 - protein, 285 aa, Zea mays; identical to SEQ ID NO: 177

SEQ ID NO: 350 - protein, 410 aa, Zea mays; identical to SEQ ID NO: 179

SEQ ID NO: 351 - protein, 339 aa, Zea mays; identical to SEQ ID NO: 182

SEQ ID NO: 352 - protein, 318 aa, Zea mays; identical to SEQ ID NO: 183

SEQ ID NO: 353 - protein, 1467 aa, Zea mays; identical to SEQ ID NO: 184

SEQ ID NO: 354 - protein, 342 aa, Zea mays; identical to SEQ ID NO: 188

SEQ ID NO: 355 - protein, 211 aa, Zea mays; identical to SEQ ID NO: 189

SEQ ID NO: 356 - protein, 436 aa, Zea mays; identical to SEQ ID NO: 190

SEQ ID NO: 357 - protein, 566 aa, Zea mays; identical to SEQ ID NO: 192

SEQ ID NO: 358 - protein, 312 aa, Zea mays; identical to SEQ ID NO: 193

SEQ ID NO: 359 - protein, 380 aa, Zea mays; identical to SEQ ID NO: 194

SEQ ID NO: 360 - protein, 882 aa, Zea mays; identical to SEQ ID NO: 196

SEQ ID NO: 361 - protein, 268 aa, Zea mays; identical to SEQ ID NO: 198

SEQ ID NO: 362 - protein, 358 aa, Zea mays; identical to SEQ ID NO: 200

SEQ ID NO: 363 - protein, 664 aa, Zea mays; identical to SEQ ID NO: 201

SEQ ID NO: 364 - protein, 418 aa, Zea mays; identical to SEQ ID NO: 204

SEQ ID NO: 365 - protein, 395 aa, Zea mays; identical to SEQ ID NO: 205

SEQ ID NO: 366 - protein, 349 aa, Zea mays; identical to SEQ ID NO: 206

SEQ ID NO: 367 - protein, 309 aa, Zea mays; identical to SEQ ID NO: 207

SEQ ID NO: 368 - protein, 438 aa, Zea mays; identical to SEQ ID NO: 210

SEQ ID NO: 369 - protein, 452 aa, Zea mays; identical to SEQ ID NO: 211

SEQ ID NO: 370 - protein, 272 aa, Zea mays; identical to SEQ ID NO: 214

SEQ ID NO: 371 - protein, 371 aa, Zea mays; identical to SEQ ID NO: 215

SEQ ID NO: 372 - protein, 358 aa, Zea mays; identical to SEQ ID NO: 216

SEQ ID NO: 373 - protein, 447 aa, Zea mays; identical to SEQ ID NO: 218

SEQ ID NO: 374 - protein, 292 aa, Zea mays; identical to SEQ ID NO: 220

SEQ ID NO: 375 - protein, 296 aa, Zea mays; identical to SEQ ID NO: 221

SEQ ID NO: 376 - protein, 361 aa, Zea mays; identical to SEQ ID NO: 223

SEQ ID NO: 377 - protein, 348 aa, Zea mays; identical to SEQ ID NO: 224

SEQ ID NO: 378 - protein, 371 aa, Zea mays; identical to SEQ ID NO: 226

SEQ ID NO: 379 - protein, 324 aa, Arabidopsis thaliana
METEEEMKESSISMVEAKLPPGFRFHPKDDELVCDYLMRRSLHNNHRPPLVLIQVDLNKCEPWDIPKMACVGGKDWYFYSQRDRKYATGLRTNRATATGYWKATGKDRTILRKGKLVGMRKTLVFYQGRAPRGRKTDWVMHEFRLQGSHHPPNHSLSSPKEDWVLCRVFHKNTEGVICRDNMGSCFDETASASLPPLMDPYINFDQEPSSYLSDDHHYIINEHVPCFSNLSQNQTLNSNLTNSVSELKIPCKNPNPLFTGGSASATLTGLDSFCSSDQMVLRALLSQLTKIDGSLGPKESQSYGEGSSESLLTDIGIPSTVWNC

SEQ ID NO: 380 - protein, 268 aa, Arabidopsis thaliana
MEVTSQSTLPPGFRFHPTDEELIVYYLRNQTMSKPCPVSIIPEVDIYKFDPWQLPEKTEFGENEWYFFSPRERKYPNGVRPNRAAVSGYWKATGTDKAIHSGSSNVGVKKALVFYKGRPPKGIKTDWIMHEYRLHDSRKASTKRNGSMRLDEWVLCRIYKKRGASKLLNEQEGFMDEVLMEDETKVVVNEAERRTEEEIMMMTSMKLPRTCSLAHLLEMDYMGPVSHIDNFSQFDHLHQPDSESSWFGDLQFNQDEILNHHRQAMFKF

SEQ ID NO: 381 - protein, 317 aa, Arabidopsis thaliana; identical to SEQ ID NO: 227

SEQ ID NO: 382 - protein, 576 aa, Arabidopsis thaliana
MVDSSRDSCFKAGKFSAPGFRFHPTDEELVVYYLKRKICCKKLRVNAIGVVDVYKVDPSELPGNFQHLLIDFDSCLSMLKTGDRQWFFFTPRNRKYPNAARSSRGTATGYWKATGKDRVIEYNSRSVGLKKTLVFYRGRAPNGERTDWVMHEYTMDEEELGRCKNAKEYYALYKLYKKSGAGPKNGEQYGAPFQEEEWVDSDSEDADSVAVPDYPVVRYENGPCVDDTKFCNPVKLQLEDIEKLLNEIPDAPGVNQRQFDEFVGVPQGNSAEVIQSTLLNNSSGEYIDPRTNGMFLPNGQLYNRDSSFQSHLNSFEATSGMAPLLDNEKEEYIEMNDLLIPELGASSTEKSTEFLNHGEFGDVNEYDQLFNDISVFQGTSTDLSCLSNFTNNTSGQRQQLLYEQFQYQTPENQLNNYMHPSTTLNQFTDNMWFKDDQAALYVQPPQSSSGAFTSQSTGVMPESMNPTMSVNPQYKEGQNGGGTRSQFSSALWELLESIPSTPASACEGPLNQTFVRMSSFSRIRFNGTSVTSRKVTVAKKRISNRGFLLLSIMGALCAIFWVFKATVGVMGRPLLS

SEQ ID NO: 383 - protein, 314 aa, Arabidopsis thaliana
MGVREKDPLAQLSLPPGFRFYPTDEELLVQYLCRKVAGYHFSLQVIGDIDLYKFDPWDLPSKQTCFTFVGEYNCNYLGKALFGEKEWYFFSPRDRKYPNGSRPNRVAGSGYWKATGTDKIITADGRRVGIKKALVFYAGKAPKGTKTNWIMHEYRLIEHSRSHGSSKLDDWVLCRIYKKTSGSQRQAVTPVQACREEHSTNGSSSSSSSQLDDVLDSFPEIKDQSFNLPRMNSLRTILNGNFDWASLAGLNPIPELAPTNGLPSYGGYDAFRAAEGEAESGHVNRQQNSSGLTQSFGYSSSGFGVSGQTFEFRQ

SEQ ID NO: 384 - protein, 289 aa, Arabidopsis thaliana
MSELLQLPPGFRFHPTDEELVMHYLCRKCASQSIAVPIIAEIDLYKYDPWELPGLALYGEKEWYFFSPRDRKYPNGSRPNRSAGSGYWKATGADKPIGLPKPVGIKKALVFYAGKAPKGEKTNWIMHEYRLADVDRSVRKKKNSLRLDDWVLCRIYNKKGATERRGPPPPVVYGDEIMEEKPKVTEMVMPPPPQQTSEFAYFDTSDSVPKLHTTDSSCSEQVVSPEFTSEVQSEPKWKDWSAVSNDNNNTLDFGFNYIDATVDNAFGGGGSSNQMFPLQDMFMYMQKPY

SEQ ID NO: 385 - protein, 275 aa, Arabidopsis thaliana
MSGEGNLGKDHEEENEAPLPGFRFHPTDEELLGYYLRRKVENKTIKLELIKQIDIYKYDPWDLPRVSSVGEKEWYFFCMRGRKYRNSVRPNRVTGSGFWKATGIDKPVYSNLDCVGLKKSLVYYLGSAGKGTKTDWMMHEFRLPSTTKTDSPAQQAEVWTLCRIFKRVTSQRNPTILPPNRKPVITLTDTCSKTSSLDSDHTSHRTVDSMSHEPPLPQPQNPYWNQHIVGFNQPTYTGNDNNLLMSFWNGNGGDFIGDSASWDELRSVIDGNTKP

SEQ ID NO: 386 - protein, 310 aa, Arabidopsis thaliana
MDVDVFNGWGRPRFEDESLMPPGFRFHPTDEELITYYLLKKVLDSNFSCAAISQVDLNKSEPWELPEKAKMGEKEWYFFTLRDRKYPTGLRTNRATEAGYWKATGKDREIKSSKTKSLLGMKKTLVFYKGRAPKGEKSCWVMHEYRLDGKFSYHYISSSAKDEWVLCKVCLKSGVVSRETNLISSSSSSAVTGEFSSAGSAIAPIINTFATEHVSCFSNNSAAHTDASFHTFLPAPPPSLPPRQPRHVGDGVAFGQFLDLGSSGQIDFDAAAAAFFPNLPSLPPTVLPPPPSFAMYGGGSPAVSVWPFTL

SEQ ID NO: 387 - protein, 320 aa, Arabidopsis thaliana
MESTDSSGGPPPPQPNLPPGFRFHPTDEELVIHYLKRKADSVPLPVAIIADVDLYKFDPWELPAKASFGEQEWYFFSPRDRKYPNGARPNRAATSGYWKATGTDKPVISTGGGGSKKVGVKKALVFYSGKPPKGVKSDWIMHEYRLTDNKPTHICDFGNKKNSLRLDDWVLCRIYKKNNSTASRHHHHLHHIHLDNDHHRHDMMIDDDRFRHVPPGLHFPAIFSDNNDPTAIYDGGGGGYGGGSYSMNHCFASGSKQEQLFPPVMMMTSLNQDSGIGSSSSPSKRFNGGGVGDCSTSMAATPLMQNQGGIYQLPGLNWYS

SEQ ID NO: 388 - protein, 285 aa, Arabidopsis thaliana
MDYEASRIVEMVEDEEHIDLPPGFRFHPTDEELITHYLKPKVFNTFFSATAIGEVDLNKIEPWDLPWKAKMGEKEWYFFCVRDRKYPTGLRTNRATEAGYWKATGKDKEIFKGKSLVGMKKTLVFYKGRAPKGVKTNWVMHEYRLEGKYCIENLPQTAKNEWVICRVFQKRADGTKVPMSMLDPHINRMEPAGLPSLMDCSQRDSFTGSSSHVTCFSDQETEDKRLVHESKDGFGSLFYSDPLFLQDNYSLMKLLLDGQETQFSGKPFDGRDSSGTEELDCVWNF

SEQ ID NO: 389 - protein, 318 aa, Arabidopsis thaliana
MDYKVSRSGEIVEGEVEDSEKIDLPPGFRFHPTDEELITHYLRPKVVNSFFSAIAIGEVDLNKVEPWDLPWKAKLGEKEWYFFCVRDRKYPTGLRTNRATKAGYWKATGKDKEIFKGKSLVGMKKTLVFYKGRAPKGVKTNWVMHEYRLEGKFAIDNLSKTAKNECVISRVFHTRTDGTKEHMSVGLPPLMDSSPYLKSRGQDSLAGTTLGGLLSHVTYFSDQTTDDKSLVADFKTTMFGSGSTNFLPNIGSLLDFDPLFLQNNSSVLKMLLDNEETQFKKNLHNSGSSESELTASSWQGHNSYGSTGPVNLDCVWKF

SEQ ID NO: 390 - protein, 451 aa, Arabidopsis thaliana
MKEDMEVLSLASLPVGFRFSPTDEELVRYYLRLKINGHDNDVRVIREIDICKWEPWDLPDFSVVKTTDSEWLFFCPLDRKYPSGSRMNRATVAGYWKATGKDRKIKSGKTKIIGVKRTLVFYTGRAPKGTRTCWIMHEYRATEKDLDGTKSGQNPFVVCKLFKKQDIVNGAAEPEESKSCEVEPAVSSPTVVDEVEMSEVSPVFPKTEETNPCDVAESSLVIPSECRSGYSVPEVTTTGLDDIDWLSFMEFDSPKLFSPLHSQVQSELGSSFNGLQSESSELFKNHNEDYIQTQYGTNDADEYMSKFLDSFLDIPYEPEQIPYEPQNLSSCNKINDESKRGIKIRARRAQAPGCAEQFVMQGDASRRLRLQVNLNSHKSETDSTQLQFIKKEVKDTTTETMTKGCGNFTRSKSRTSFIFKKIAAMGCSYRGLFRVGVVAVVCVMSVCSLVA

SEQ ID NO: 391 - protein, 365 aa, Arabidopsis thaliana
MEPMESCSVPPGFRFHPTDEELVGYYLRKKIASQKIDLDVIRDIDLYRIEPWDLQEQCRIGYEEQNEWYFFSHKDKKYPTGTRTNRATMAGFWKATGRDKAVYDKTKLIGMRKTLVFYKGRAPNGKKSDWIMHEYRLESDENAPPQEEGWVVCRAFKKRATGQAKNTETWSSSYFYDEVAPNGVNSVMDPIDYISKQQHNIFGKGLMCKQELEGMVDGINYIQSNQFIQLPQLQSPSLPLMKRPSSSMSITSMDNNYNYKLPLADEESFESFIRGEDRRKKKKQVMMTGNWRELDKFVASQLMSQEDNGTSSFAGHHIVNEDKNNNDVEMDSSMFLSEREEENRFVSEFLSTNSDYDIGICVFDN

SEQ ID NO: 392 - protein, 329 aa, Oryza sativa
MECGGALQLPPGFRFHPTDDELVMYYLCRKCGGLPLAAPVIAEVDLYKFNPWDLPERAMGGEKEWYFFSPRDRKYPNGQRPNRAAGTGYWKATGADKPVGSPRAVAIKKALVFYAGKPPKGVKTNWIMHEYRLADVDRSAAARKLSKSSHNALRLDDWVLCRIYNKKGVIERYDTVDAGEDVKPAAAAAAAKGGRIGGGGGAAAMRVELSDYGFYDQEPESEMLCFDRSGSADRDSMPRLHTDSSGSEHVLSPSPSPDDFPGGGDHDYAESQPSGGCGGWPGVDWAAVGDDGFVIDSSLFELPSPAAFSRAAGDGAAFGDMFTYLQKPF

SEQ ID NO: 393 - protein, 314 aa, Oryza sativa
MGMRRERDAEAELNLPPGFRFHPTDDELVEHYLCRKAAGQRLPVPIIAEVDLYKFDPWDLPERALFGAREWYFFTPRDRKYPNGSRPNRAAGNGYWKATGADKPVAPRGRTLGIKKALVFYAGKAPRGVKTDWIMHEYRLADAGRAAAGAKKGSLRLDDWVLCRLYNKKNEWEKMQQGKEVKEEASDMVTSQSHSHTHSWGETRTPESEIVDNDPFPELDSFPAFQPAPPPATAMMVPKKESMDDATAAAAAAATIPRNNSSLFVDLSYDDIQGMYSGLDMLPPGDDFYSSLFASPRVKGTTPRAGAGMGMVPF

SEQ ID NO: 394 - protein, 333 aa, Oryza sativa
MSMMSFLSMVEAELPPGFRFHPRDDELICDYLAPKVAGKVGFSGRRPPMVDVDLNKVEPWDLPEVASVGGKEWYFFSLRDRKYATGQRTNRATVSGYWKATGKDRVVARRGALVGMRKTLVFYQGRAPKGRKTEWVMHEYRMEGVHDQQASSFSSKEDWVLCRVICKRKSGGGATSKSRSLTTTTTTIVHDTSTPTSSPPLPPLMDTTLAQLQASMNTSSSSAIAAVAALEQVPCFSSFSNSIASNNNNSNSATVNAQQCYLPIVTGSNNNGMSYLDHGLPEFGSFLDTQSCDKKMLKAVLSQLNSIGGEVLPGLPPPSEMAAAVSSSWMNHF

SEQ ID NO: 395 - protein, 293 aa, Oryza sativa
MSFIGMVEARMPPGFRFHPRDDELVLDYLLHKLAAGGRGGGVYGGGGGVAIVDVDLNKCEPWDLPDAACVGGKEWYFFSLRDRKYATGHRTNRATRSGYWKATGKDRSITRRSSISSGEPSSSAAAAAVGMRKTLVFYRGRAPKGRKTEWVMHEFRLEPQPLHLKEDWVLCRVFYKTRQTIPSPSSEEAVTLPNELDLPATPSLPPLIDAYIAFDSAPTTTPSMVGSYEQVSCFSGLPALPMKGSISFGDLLAMDTSAEKKAIRVLHNSNTAKLELSPDWGQESGLSQMWNPQ

SEQ ID NO: 396 - protein, 334 aa, Oryza sativa
MEEEQRLPAGFRFFPTDEELVTYYLARKAMDATFTSAAIRDVDLYTSDPWHLPCDSSAASTGGGGGGECYFFCRRSSKYPSGARVRRATAGGYWKSTGKDKGVYAAGGGGGLVGTKKTLVFYEGRAPRGEKTSWVMHEYSRAPSTNFIRGAQARTHNLLDIIYSEWVICRVFKKQPPIEHWLEMEEVETTTTTTTVQEHTPNRRRLPPAEAAAAPPPPSGQPWQHTSRRSGDGRAAIDGGNREEEEDEHGLAREESSSPVVISSPSRCTSSPSSRLLNHEHLGASSSDDLPELMEFGDIYGGIAAGGPTDQQASSSNSNSICNFLDEPYYCWNF

SEQ ID NO: 397 - protein, 301 aa, Oryza sativa
MSESEVSVINQLEEEETRLELPPGFRFHPTDEEVVTHYLTRKAQDRSFSCVVIADVNLNNCEPWDLPSKAKMGEKEWFFFCHKDRKYPTGMRTNRATASGYWKATGKDKEIFRGRGLLVGMKKTLVFYMGRAPRGEKTPWVMHEYRLDGKLPPNLPRSAKEEWAVCRVFNKDLAAKIAQMPPPPFPRNDSFDLDLDDFLHLDADLPPLIDDPFASTSTLKTEPPPPANLMHNHYGYFSLPASATNYNHSSGAMADQAIRRFCKAEASTACFSGADADVDPVVDELLSFPDSITDYSYIWKA

SEQ ID NO: 398 - protein, 303 aa, Oryza sativa
MSGGQDLQLPPGFRFHPTDEELVMHYLCRRCAGLPIAVPIIAEIDLYKFDPWQLPRMALYGEKEWYFFSPRDRKYPNGSRPNRAAGSGYWKATGADKPVGSPKPVAIKKALVFYAGKAPKGEKTNWIMHEYRLADVDRSARKKNSLRLDDWVLCRIYNKKGGLEKPPAAAVAAAGMVSSGGGVQRKPMVGVNAAVSSPPEQKPVVAGPAFPDLAAYYDRPSDSMPRLHADSSCSEQVLSPEFACEVQSQPKISEWERTFATVGPINPAASILDPAGSGGLGGLGGGGSDPLLQDILMYWGKPF

SEQ ID NO: 399 - protein, 392 aa, Oryza sativa
MVLSNPAMLPPGFRFHPTDEELIVHYLRNRAASSPCPVSIIADVDIYKFDPWDLPSKENYGDREWYFFSPRDRKYPNGIRPNRAAGSGYWKATGTDKPIHSSGGAATNESVGVKKALVFYKGRPPKGTKTNWIMHEYRLAAADAHAANTYRPMKFRNTSMRLDDWVLCRIYKKSSHASPLAVPPLSDHEQDEPCALEENAPLYAPSSSSAASMILQGAAAGAFPSLHAAAAATQRTAMQKIPSISDLLNEYSLSQLFDDGGAAAAAPLQEMARQPDHHHHQQQQHALFGHPVMNHFIANNSMVQLAHLDPSSSAAASTSAGAVVEPPAVTGKRKRSSDGGEPTIQALPPAAAAAKKPNGSCVGATFQIGSALQGSSLGLSHQMLLHSNMGMN

SEQ ID NO: 400 - protein, 319 aa, Solanum lycopersicum
MEIVCGFGGREEEMELPPGFRFHPTDEELITHYLAPKVLDSGFCAIAIGEVDLNKVEPWDLPWKAKMGEKEWYFFCMRDKKYPTGQRTNRATEAGYWKATGKDKEIFKSKTLVGMKKTLVFYKGRAPRGEKTNWVMHEYRLDGKYSIHNLPKTAKNECVICRIFKKNSGGKKIAISNLTRSDSITDNSRSSNLPPLMDLSPYNKITTTARSSGETCNSHVTCFSDSMEDQKPQTYDHHHLLSSSPVSVDFPQNVPNDSMTYMGNFQYGDSGLMQDNSIMRLLIDNNYGSESKQSLRGYEDHDINISSTGPVDIDCLWNY

SEQ ID NO: 401 - protein, 275 aa, Solanum lycopersicum
MVGKNNSNHLPPGFRFHPTDEELIMYYLRNQATSKPCPSSIIPEVDVYKFDPWELPEKTEFGEKEWYFFTPRDRKYPNGVRPNRAAVSGYWKATGTDKGIYSGTKYVGIKKALVFYKGKPPKGIKTDWIMHEYRLSESRTQPTRPNGSMRLDDWVLCRIYKKKNLERAIEMMKVEEDTQEPQIMSVTNPIHEVVASNGQQTLKLPRTCSLSHLLEMDYFGSISQLFDDNNSYNTISQNNTLMTNVNGYVMPHQAMEKFQLGEVSQISMNPSYQFQ

SEQ ID NO: 402 - protein, 405 aa, Triticum dicoccoides
MGSSDSSSGSAQKATRYHHQHQPPPPQRGSAPELPPGFRFHPTDEELVVHYLKKKADKAPLPVNIIAEVDLYKFDPWELPEKATIGEQEWYFFSPRDRKYPNGARPNRAATSGYWKATGTDKPILASGTGCGLVREKLGVKKALVFYRGKPPKGLKTNWIMHEYRLTDASGSTTATNRPPPVTGGSRAAASLRLDDWVLCRIYKKINKAAAGDQQRNTECEDSVEDAVTAYPLYATAGMTGAGAHGSNYASPSLLHHQDSHFLDGLFTADDAGLSAGATSLSHLAAAARASPAPTKQFLAPSSSTPFNWLDASPVGILPQARNFPGFNRSRNVGNMSLSSTADMAGAVDNGGGNAVNAMSTYLPVQDGTYHQQHVILGAPLVPEAAAATSGFQHPVQISGVNWNP

SEQ ID NO: 403 - protein, 289 aa, Triticum aestivum
MSSIGMMEARMPPGFRFHPRDEELVLDYLLHKLTGRRAYGGVDIVDVDLNKCEPWDLPEAACVGGREWYFFSLRDRKYATGQRTNRATRSGYWKATGKDRAILAHGEALVGMRKTLVFYQGRAPKGTRTEWVMHEFRLEEERHRHHHQQKGGAAAAEARCQLKEDWVLCRVFYKSRTSSPRPPSEEVYTFFSELDLPTMPPLAPLIDACIAFDSGTAMNTIEQASCFSGLPALPLRGSMSFGDLLGWDNPEKKAIRTSLSNMSSNSNSKLELTPNWSQENGLSQMWTPL
